(19) United States
(12) Patent Application Publication
(10) Pub. No.: US 2022/0204643 A1
(43) Pub. Date: Jun. 30, 2022

(54) CANCER ASSOCIATED ANTIBODY COMPOSITIONS AND METHODS OF USE

(71) Applicant: Target Discovery Merger Sub II, LLC, Vancouver, WA (US)

(72) Inventors: Daniele Biasci, Poole, Dorset (GB); Goran Rakocevic, Belgrade (RS); Berke Cagkan Toptas, Cambridge, MA (US); Ines De Santiago Domingos De Jesus, London (GB)

(21) Appl. No.: 17/606,246

(22) PCT Filed: Apr. 29, 2020
(86) PCT No.: PCT/US20/30534

§ 371 Date: Oct. 25, 2021

Related U.S. Application Data
(60) Provisional application No. 62/840,638, filed on Apr. 30, 2019.
(60) Provisional application No. 62/840,640, filed on Apr. 30, 2019.
(60) Provisional application No. 62/840,644, filed on Apr. 30, 2019.
(60) Provisional application No. 62/840,648, filed on Apr. 30, 2019.
(60) Provisional application No. 62/840,855, filed on Apr. 30, 2019.
(60) Provisional application No. 62/840,858, filed on Apr. 30, 2019.
(60) Provisional application No. 62/840,860, filed on Apr. 30, 2019.
(60) Provisional application No. 62/840,861, filed on Apr. 30, 2019.
(60) Provisional application No. 62/840,864, filed on Apr. 30, 2019.
(60) Provisional application No. 62/840,870, filed on Apr. 30, 2019.
(60) Provisional application No. 62/840,875, filed on Apr. 30, 2019.
(60) Provisional application No. 62/840,880, filed on Apr. 30, 2019.
(60) Provisional application No. 62/840,893, filed on Apr. 30, 2019.
(60) Provisional application No. 62/840,904, filed on Apr. 30, 2019.
(60) Provisional application No. 62/840,909, filed on Apr. 30, 2019.
(60) Provisional application No. 62/840,917, filed on Apr. 30, 2019.
(60) Provisional application No. 62/840,938, filed on Apr. 30, 2019.
(60) Provisional application No. 62/840,950, filed on Apr. 30, 2019.
(60) Provisional application No. 62/840,957, filed on Apr. 30, 2019.
(60) Provisional application No. 62/840,970, filed on Apr. 30, 2019.
(60) Provisional application No. 62/841,036, filed on Apr. 30, 2019.
(60) Provisional application No. 62/841,044, filed on Apr. 30, 2019.
(60) Provisional application No. 62/841,047, filed on Apr. 30, 2019.
(60) Provisional application No. 62/841,049, filed on Apr. 30, 2019.

(51) Int. Cl. C07K 16/32; C07K 16/30

(52) U.S. Cl. CPC C07K 16/32; C07K 2317/10; C07K 16/30

(57) ABSTRACT

The disclosure herein relates to novel cancer-associated antibodies and antigen-binding fragments that are used in the diagnosis of a cancer or a metastasis thereof. The disclosure herein relates to novel cancer-associated antibodies and antigen-binding fragments that are used in the treatment of a cancer or a metastasis thereof. The disclosure herein relates to novel chimeric antigen receptor or a T cell receptor fusion protein that comprise one or more cancer-associated antigen-binding domains that are useful for the treatment of a cancer.

### CROSS-REFERENCE

[0001] This application claims the benefit of U.S. Provisional Application No. 62/840,638, filed Apr. 30, 2019, U.S. Provisional Application No. 62/840,640, filed Apr. 30, 2019, U.S. Provisional Application No. 62/840,644, filed Apr. 30, 2019, U.S. Provisional Application No. 62/840,648, filed Apr. 30, 2019, U.S. Provisional Application No. 62/840,855, filed Apr. 30, 2019, U.S. Provisional Application No. 62/840,858, filed Apr. 30, 2019, U.S. Provisional Application No. 62/840,860, filed Apr. 30, 2019, U.S. Provisional Application No. 62/840,861, filed Apr. 30, 2019, U.S. Provisional Application No. 62/840,864, filed Apr. 30, 2019, U.S. Provisional Application No. 62/840,870, filed Apr. 30, 2019, U.S. Provisional Application No. 62/840,875, filed Apr. 30, 2019, U.S. Provisional Application No. 62/840,880, filed Apr. 30, 2019, U.S. Provisional Application No. 62/840,893, filed Apr. 30, 2019, U.S. Provisional Application No. 62/840,904, filed Apr. 30, 2019, U.S. Provisional Application No. 62/840,909, filed Apr. 30, 2019, U.S. Provisional Application No. 62/840,917, filed Apr. 30, 2019, U.S. Provisional Application No. 62/840,938, filed Apr. 30, 2019, U.S. Provisional Application No. 62/840,950, filed Apr. 30, 2019, U.S. Provisional Application No. 62/840,957, filed Apr. 30, 2019, U.S. Provisional Application No. 62/840,970, filed Apr. 30, 2019, U.S. Provisional Application No. 62/841,036, filed Apr. 30, 2019, U.S. Provisional Application No. 62/841,044, filed Apr. 30, 2019, U.S. Provisional Application No. 62/841,047, filed Apr. 30, 2019, and U.S. Provisional Application No. 62/841,049, filed Apr. 30, 2019; each of which application is incorporated herein by reference in their entirety.

### REFERENCE TO A SEQUENCE LISTING

[0002] The present application includes a Sequence Listing which has been submitted electronically in ASCII format and is hereby incorporated by reference in its entirety. Said ASCII copy, created on Apr. 28, 2020, is named 54407_705_601_Sequence_Listing.txt and is 4,053,188 bytes in size.

### BACKGROUND OF THE INVENTION

[0003] While the role of cytotoxic T cells in mediating immune responses against cancer is well established, the role of B cells is less known. In particular, the effect of antibodies identified in cancer patients is still unclear: while some studies suggested that such antibodies might promote tumor progression, others have reported that they might stimulate anti-tumor immunity.

### SUMMARY OF THE INVENTION

[0004] In one aspect, provided herein is an antibody or antigen-binding fragment thereof that comprises at least one of a variable heavy chain complementarity-determining region 1 (CDR-H1), a CDR-H2 and a CDR-H3, wherein: the CDR-H1 comprises a reconstructed polypeptide consensus sequence selected from any one of SEQ ID NOs: 543-813, the CDR-H2 comprises a reconstructed polypeptide consensus sequence selected from any one of SEQ ID NOs: 1085-1355, and the CDR-H3 comprises a reconstructed polypeptide consensus sequence selected from any one of SEQ ID NOs: 1627-1897.

[0005] In one aspect provided herein is an antibody or antigen-binding fragment thereof that comprises at least one of a variable light chain complementarity-determining region 1 (CDR-L1), a CDR-L2 and a CDR-L3, wherein: the CDR-L1 comprises a reconstructed polypeptide consensus sequence selected from any one of SEQ ID NOs: 814-1084, the CDR-L2 comprises a reconstructed polypeptide consensus sequence selected from any one of SEQ ID NOs: 1356-1626, and the CDR-L3 comprises a reconstructed polypeptide consensus sequence selected from any one of SEQ ID NOs: 1898-2168.

[0006] In one aspect provided herein is an antibody or antigen-binding fragment thereof that comprises: a variable heavy chain complementarity-determining region 1 (CDR-H1), a CDR-H2 and a CDR-H3, wherein: the CDR-H1 comprises a reconstructed polypeptide consensus sequence selected from any one of SEQ ID NOs: 543-813, the CDR-H2 comprises a reconstructed polypeptide consensus sequence selected from any one of SEQ ID NOs: 1085-1355, and the CDR-H3 comprises a reconstructed polypeptide consensus sequence selected from any one of SEQ ID NOs: 1627-1897; and a variable light chain complementarity-determining region 1 (CDR-L1), a CDR-L2, and a CDR-L3, wherein: the CDR-L1 comprises a reconstructed polypeptide consensus sequence selected from any one of SEQ ID NOs: 814-1084, the CDR-L2 comprises a reconstructed polypeptide consensus sequence selected from any one of SEQ ID NOs: 1356-1626, and the CDR-L3 comprises a reconstructed polypeptide consensus sequence selected from any one of SEQ ID NOs: 1898-2168.

[0007] In some embodiments, the antibody comprises an IgG, IgA, or IgM antibody. In some embodiments, the IgG comprises IgG1, IgG2, IgG3, IgG4, IgGA1, or IgGA2. In some embodiments, the antibody comprises a chimeric antibody, a humanized antibody, a human antibody, a monoclonal antibody, a deimmunized antibody, a bispecific antibody, a multispecific antibody, a multivalent antibody, or a combination thereof. In some embodiments, the antigen-binding fragment comprises a Fab, Fab′, Fab′-SH, Fv, scFv, F(ab′)2, a diabody, a linear antibody, a single domain antibodies (sdAb), a camelid VHH domain, or a multi-specific antibody formed from antibody fragments. In some embodiments, the antibody or antigen-binding fragment thereof is recombinant or synthetic. In some embodiments, the antibody or antigen-binding fragment thereof further comprises an enzyme, a substrate, cofactor, a fluorescent marker, a chemiluminescent marker, a peptide tag, a magnetic particle, a drug, a toxin, or a combination thereof. In some embodiments, the antibody or antigen-binding fragment thereof is cytolytic to a tumor cell or a cancer cell. In some embodiments, the antibody or antigen-binding fragment thereof inhibits tumor growth or cancer cell growth.

[0008] In some embodiments, the antibody or an antigen-binding fragment thereof is useful for treating a cancer. In some embodiments, the antibody or antigen-binding fragment thereof of aspect above is useful for treating a bladder cancer, (e.g., bladder urothelial carcinoma, squamous cell carcinoma of the bladder, adenocarcinoma of the bladder, or small cell carcinoma of the bladder), a brain cancer, (e.g., glioma, meningioma pituitary adenoma, vestibular schwannoma, nerve sheath tumor, primitive neuroectodermal tumor (medulloblastoma), ependymomas, astrocytomas, oligodendrogliomas, brainstem glioma, optic nerve glioma, mixed glioma (e.g., oligoastrocytoma), high-grade glioma, or low-grade glioma), a breast cancer or breast carcinoma, (e.g., invasive ductal carcinoma, ductal carcinoma in situ, invasive lobular carcinoma, lobular carcinoma in situ, inflammatory breast cancer, male breast cancer, phyllodes tumors of the breast, Paget's disease of the nipple, Angiosarcomas, or metastatic breast cancer), a cervical cancer (cervical squamous cell carcinoma, adenocarcinoma, adenosquamous carcinoma, small cell carcinoma, neuroendocrine tumor, glassy cell carcinoma, villoglandular adenocarcinoma, endocervical (NOS) type adenocarcinoma, mucinous adenocarcinoma, minimal deviation adenocarcinoma (mucinous and endometrioid types), enteric/GI type adenocarcinoma, endometrioid type adenocarcinoma, clear cell adenocarcinoma, serous adenocarcinoma, mesonephric adenocarcinoma, adenoid basal carcinoma, or adenoid cystic carcinoma), a cholangiocarcinoma (e.g., intrahepatic cholangiocarcinoma, hilar cholangiocarcinoma, or distal cholangiocarcinoma), a colon or rectal cancer (e.g., colon adenocarcinoma, rectal adenocarcinoma, gastrointestinal carcinoid tumors, primary colorectal lymphomas, gastrointestinal stromal tumors, leiomyosarcomas, melanoma, sarcoma, Turcot syndrome, Peutz-Jeghers syndrome, familial colorectal cancer, or juvenile polyposis coli), an esophageal cancer (e.g., esophageal cancer is squamous cell carcinoma, adenocarcinoma, choriocarcinoma, lymphoma, melanoma, or sarcoma), a head or neck squamous cell cancer (e.g., conventional type squamous cell carcinoma, verrucous carcinoma, basaloid squamous cell carcinoma, papillary squamous cell carcinoma, spindle cell carcinoma, acantholytic squamous cell carcinoma, adenosquamous carcinoma, carcinoma cuniculatum, nasopharyngeal carcinoma, lymphoepithelial carcinoma, laryngeal or hypopharyngeal cancer, nasal cavity or paranasal sinus cancer, nasopharyngeal cancer, oral and oropharyngeal cancer, salivary gland cancer, HPV-negative squamous cell carcinoma, or HPV-induced squamous cell carcinoma), a kidney cancer (e.g., renal cell carcinoma, renal pelvis carcinoma, transitional cell carcinoma, squamous cell carcinoma, juxtaglomerular cell tumor (reninoma), angiomyolipoma, bellini duct carcinoma, clear cell sarcoma of the kidney, mesoblastic nephroma, Wilms' tumor, mixed epithelial stromal tumor, clear cell adenocarcinoma, inverted papilloma, renal lymphoma, teratoma, carcinosarcoma, carcinoid tumor of the renal pelvis, kidney renal clear cell carcinoma, kidney renal papillary cell carcinoma sarcomotoid renal cell carcinoma, chromophobe renal cell carcinoma, renal medullary carcinoma, collecting duct renal cell carcinoma, unclassified renal cell carcinoma, renal oncocytoma, angiomyolipoma, or clear cell papillary carcinoma), a liver cancer (e.g., hepatocellular carcinoma, fibrolamellar hepatocellular carcinoma, cholangiocarcinoma, mucinous cystic neoplasm, intraductal papillary biliary neoplasm, hepatoblastoma, cholangiocellular cystadenocarcinoma, angiosarcoma, hemangioendothelioma, embryonal sarcoma, fibrosarcoma, leiomyosarcoma, rhabdomyosarcoma, carcinosarcomas, teratomas, yolk sac tumours, carcinoid tumours, lymphomas, or liver metastasis), a lung cancer (e.g., non-small cell lung carcinoma, small-cell lung carcinoma, lung adenocarcinoma, lung squamous cell carcinoma, large cell carcinoma, carcinoid tumors, bronchial gland carcinoma, carcinosarcoma, pulmonary blastoma, giant or spindle cell carcinoma, or sarcomatoid carcinoma), a mesothelioma (e.g., malignant mesothelioma, or malignant pleural mesothelioma), a cystadenocarcinoma (e.g., ovarian serous cystadenocarcinoma) an adenocarcinoma (e.g., pancreatic adenocarincoma), a pheochromocytoma or paraganglioma, a prostate adenocarcinoma, a sarcoma, a skin cutaneous melanoma, a stomach adenocarcinoma, a testicular germ cell cancer, a thyroid carcinoma, a uterine cancer (e.g., uterine carcinosarcoma, or uterine corpus endometrial carcinoma), a uveal melanoma.

[0009] In one aspect provided herein is an antibody or antigen-binding fragment thereof comprising: a variable heavy chain, wherein the variable heavy chain comprises a reconstructed polypeptide consensus sequence having at least 95% sequence identity to an amino acid sequence selected from any one of SEQ ID NOs: 1-271; and/or a variable light chain, wherein the variable light chain comprises a reconstructed polypeptide consensus sequence having at least 95% sequence identity to an amino acid sequence selected from any one of SEQ ID NOs: 272-542.

[0010] In one aspect provided herein is a hybridoma that produces the antibody or antigen-binding fragment thereof of any one of aspects above.

[0011] Provided herein is a fusion protein that comprises the antibody or antigen-binding fragment thereof of any one of aspects above.

[0012] Provided herein is a chimeric antigen receptor or a T cell receptor fusion protein that comprises: an antigen-binding fragment of any one of aspects above; a transmembrane domain; and an intracellular signaling domain.

[0013] Provided herein is a T cell receptor fusion protein that comprises: the antibody or antigen-binding fragment thereof of any one of aspects above; and a T cell receptor (TCR) subunit. In some embodiments, the antibody or antigen binding fragment thereof comprises a human or humanized anti-cancer antigen binding domain. In some embodiments, the TCR subunit comprises; at least a portion of a TCR extracellular domain, a transmembrane domain; and a TCR intracellular domain comprising a stimulatory domain from an intracellular signaling domain. In some embodiments, the extracellular, transmembrane, and intracellular signaling domains of the TCR subunit are either derived from only CD3 epsilon or only CD3 gamma. In some embodiments, the antibody or antigen-binding fragment thereof and the TCR extracellular domain are connected by a linker sequence. In some embodiments, the linker sequence comprises the sequence of (G4S)n, wherein G is glycine, S is serine, and n=1 to 4.

[0014] Provided herein is an isolated recombinant nucleic acid molecule encoding the T cell receptor fusion protein of any one of aspects above.

[0015] Provided herein is a vector that comprises the isolated recombinant nucleic acid molecule described above.

[0016] Provided herein is a host cell that comprises the isolated recombinant nucleic acid described above or the vector described above. In some embodiments, the host cell is a T cell.

[0017] Provided herein is a T cell expressing the T cell receptor fusion protein of any one of aspects above. In some embodiments, the T cell receptor fusion protein is functionally integrated with an endogenous T cell receptor. In some embodiments, the T cell is a CD8+ or CD4+ T-cell.

[0018] Provided herein is an immunoconjugate comprising the antibody or the antigen binding fragment thereof of any one of aspects above, and a therapeutic agent.

[0019] Provided herein is a pharmaceutical composition or a medicament that comprises the antibody or antigen-binding fragment thereof of any one of aspects above and a pharmaceutically acceptable carrier, excipient or diluent. In some embodiments, the pharmaceutical composition described above further comprises a second therapeutic agent. In some embodiments, the second therapeutic agent comprises a cancer chemotherapeutic agent, radiation therapy, a cytotoxic agent, another antibody, a NSAID, a corticosteroid, a dietary supplement such as an antioxidant, or a combination thereof. In some embodiments, the second therapeutic agent comprises a cancer chemotherapeutic agent. In some embodiments, the pharmaceutical composition of any one of aspects above is, formulated for administration via a subcutaneous, intravenous, intradermal, intraperitoneal, intramuscular, intracerebroventricular, intracranial, intracelial, or intracerebellar administration route. In some embodiments, the pharmaceutical composition of any one of aspects above is, in an aqueous or in a lyophilized form. In some embodiments, the pharmaceutical composition of any one of aspects above, contained in a delivery device selected from the group consisting of a syringe, a blunt tip syringe, a catheter, and an implantable pump.

[0020] Provided herein is a use of the antibody or antigen binding fragment of any one of aspects above for treating a cancer.

[0021] Provided herein is a use of the antibody or antigen binding fragment of any one of aspects above or immunoconjugate described above in the manufacture of a medicament. In some embodiments, the medicament is for treatment of a cancer.

[0022] Provided herein is a method for treating a subject suffering from a cancer, the method comprising administering to the subject a therapeutically effective amount of the antibody or antigen-binding fragment thereof of any one of aspects above. In some embodiments, the antibody or antigen-binding fragment thereof is cytolytic to a tumor cell. In some embodiments, the antibody or antigen-binding fragment thereof inhibits tumor growth.

[0023] In some embodiments, the cancer is a bladder cancer, (e.g., bladder urothelial carcinoma, squamous cell carcinoma of the bladder, adenocarcinoma of the bladder, or small cell carcinoma of the bladder), a brain cancer, (e.g., glioma, meningioma pituitary adenoma, vestibular schwannoma, nerve sheath tumor, primitive neuroectodermal tumor (medulloblastoma), ependymomas, astrocytomas, oligodendrogliomas, brainstem glioma, optic nerve glioma, mixed glioma (e.g., oligoastrocytoma), high-grade glioma, or low-grade glioma), a breast cancer or breast carcinoma, (e.g., invasive ductal carcinoma, ductal carcinoma in situ, invasive lobular carcinoma, lobular carcinoma in situ, inflammatory breast cancer, male breast cancer, phyllodes tumors of the breast, Paget's disease of the nipple, Angiosarcomas, or metastatic breast cancer), a cervical cancer (cervical squamous cell carcinoma, adenocarcinoma, adenosquamous carcinoma, small cell carcinoma, neuroendocrine tumor, glassy cell carcinoma, villoglandular adenocarcinoma, endocervical (NOS) type adenocarcinoma, mucinous adenocarcinoma, minimal deviation adenocarcinoma (mucinous and endometrioid types), enteric/GI type adenocarcinoma, endometrioid type adenocarcinoma, clear cell adenocarcinoma, serous adenocarcinoma, mesonephric adenocarcinoma, adenoid basal carcinoma, or adenoid cystic carcinoma), a cholangiocarcinoma (e.g., intrahepatic cholangiocarcinoma, hilar cholangiocarcinoma, or distal cholangiocarcinoma), a colon or rectal cancer (e.g., colon adenocarcinoma, rectal adenocarcinoma, gastrointestinal carcinoid tumors, primary colorectal lymphomas, gastrointestinal stromal tumors, leiomyosarcomas, melanoma, sarcoma, Turcot syndrome, Peutz-Jeghers syndrome, familial colorectal cancer, or juvenile polyposis coli), an esophageal cancer (e.g., esophageal cancer is squamous cell carcinoma, adenocarcinoma, choriocarcinoma, lymphoma, melanoma, or sarcoma), a head or neck squamous cell cancer (e.g., conventional type squamous cell carcinoma, verrucous carcinoma, basaloid squamous cell carcinoma, papillary squamous cell carcinoma, spindle cell carcinoma, acantholytic squamous cell carcinoma, adenosquamous carcinoma, carcinoma cuniculatum, nasopharyngeal carcinoma, lymphoepithelial carcinoma, laryngeal or hypopharyngeal cancer, nasal cavity or paranasal sinus cancer, nasopharyngeal cancer, oral and oropharyngeal cancer, salivary gland cancer, HPV-negative squamous cell carcinoma, or HPV-induced squamous cell carcinoma), a kidney cancer (e.g., renal cell carcinoma, renal pelvis carcinoma, transitional cell carcinoma, squamous cell carcinoma, juxtaglomerular cell tumor (reninoma), angiomyolipoma, bellini duct carcinoma, clear cell sarcoma of the kidney, mesoblastic nephroma, Wilms' tumor, mixed epithelial stromal tumor, clear cell adenocarcinoma, inverted papilloma, renal lymphoma, teratoma, carcinosarcoma, carcinoid tumor of the renal pelvis, kidney renal clear cell carcinoma, kidney renal papillary cell carcinoma sarcomotoid renal cell carcinoma, chromophobe renal cell carcinoma, renal medullary carcinoma, collecting duct renal cell carcinoma, unclassified renal cell carcinoma, renal oncocytoma, angiomyolipoma, or clear cell papillary carcinoma), a liver cancer (e.g., hepatocellular carcinoma, fibrolamellar hepatocellular carcinoma, cholangiocarcinoma, mucinous cystic neoplasm, intraductal papillary biliary neoplasm, hepatoblastoma, cholangiocellular cystadenocarcinoma, angiosarcoma, hemangioendothelioma, embryonal sarcoma, fibrosarcoma, leiomyosarcoma, rhabdomyosarcoma, carcinosarcomas, teratomas, yolk sac tumours, carcinoid tumours, lymphomas, or liver metastasis), a lung cancer (e.g., non-small cell lung carcinoma, small-cell lung carcinoma, lung adenocarcinoma, lung squamous cell carcinoma, large cell carcinoma, carcinoid tumors, bronchial gland carcinoma, carcinosarcoma, pulmonary blastoma, giant or spindle cell carcinoma, or sarcomatoid carcinoma), a mesothelioma (e.g., malignant mesothelioma, or malignant pleural mesothelioma), a cystadenocarcinoma (e.g., ovarian serous cystadenocarcinoma) an adenocarcinoma (e.g., pancreatic adenocarincoma), a pheochromocytoma or paraganglioma, a prostate adenocarcinoma, a sarcoma, a skin cutaneous melanoma, a stomach adenocarcinoma, a testicular germ cell cancer, a thyroid carcinoma, a uterine cancer (e.g., uterine carcinosarcoma, or uterine corpus endometrial carcinoma), a uveal melanoma.

[0024] In some embodiments, the antibody or antigen-binding fragment thereof is administered subcutaneously, intravenously, intradermally, intraperitoneally, orally, intramuscularly or intracranially. In some embodiments, the antibody or antigen-binding fragment thereof is administered to the subject in combination with a second therapeutic agent. In some embodiments, the second therapeutic agent comprises a cancer chemotherapeutic agent, radiation therapy, a cytotoxic agent, another antibody, a NSAID, a corticosteroid, a dietary supplement such as an antioxidant, or a combination thereof. In some embodiments, the anti-cancer agent is an anti-cancer antibody or a chemotherapeutic agent. In some embodiments, the second therapeutic agent is administered prior to, concurrently, or after administering the antibody or antigen binding fragment.

[0025] Provided herein is an isolated nucleic acid molecule comprising at least one of: a nucleic acid sequence encoding a CDR-H1, wherein the nucleic acid sequence is selected from SEQ ID NOs: 2711-2981; a nucleic acid sequence encoding a CDR-H2, wherein the nucleic acid sequence is selected from SEQ ID NOs: 3253-3523; a nucleic acid sequence encoding a CDR-H3, wherein the nucleic acid sequence is selected from SEQ ID NOs: 3795-4065; a nucleic acid sequence encoding a CDR-L1, wherein the nucleic acid sequence is selected from SEQ ID NOs: 2982-3252; a nucleic acid sequence encoding a CDR-L2, wherein the nucleic acid sequence is selected from SEQ ID NOs: 3524-3794; or a nucleic acid sequence encoding a CDR-L3, wherein the nucleic acid sequence is selected from SEQ ID NOs: 4066-4336.

[0026] In some embodiments, the nucleic acid sequence is selected from any one of SEQ ID NOs: 2169-2439.

[0027] Provided herein is an isolated nucleic acid molecule comprising a nucleic acid sequence encoding a light chain polypeptide of an antibody, wherein the nucleic acid sequence is selected from any one of SEQ ID NOs: 2440-2710.

[0028] Provided herein is a vector comprising the isolated nucleic acid molecule of any one of aspects above

[0029] The vector of claim 97, wherein the isolated nucleic acid is operably linked to a regulatory control sequence.

[0030] Provided herein is a host cell comprising the vector described above or the isolated nucleic acid molecule of any one of aspects above.

[0031] Provided herein is a method of producing an antibody or an antigen binding fragment thereof, the method comprising: culturing the host cell described above in a medium under conditions permitting expression of a polypeptide encoded by the isolated nucleic acid molecule and assembling of the antibody or an antigen binding fragment thereof; and purifying the antibody or antigen binding fragment thereof from the cultured cell or the medium of the cell.

[0032] Provided herein is a kit comprising a therapeutically effective amount of at least one of the antibody or antigen binding fragment thereof of any one of aspects above. In some embodiments, the kit further comprises a therapeutically effective amount of a second therapeutic agent. In some embodiments, the second therapeutic agent is an anti-cancer agent, radiation therapy, a cytotoxic agent, a NSAID, a corticosteroid, a dietary supplement such as an antioxidant, or a combination thereof. In some embodiments, the anti-cancer agent is an anti-cancer antibody or a chemotherapeutic agent. In some embodiments, the antibody or antigen binding fragment thereof is in a lyophilized or an aqueous form. In some embodiments, the kit further comprises a reconstitution solution or a diluent.

[0033] Provided herein is an antibody or an antigen binding fragment thereof that selectively binds to R-spondin 1, transcript variant 2 (RSPO1) or a variant thereof, comprising at least one of: a variable heavy chain region, wherein the variable heavy chain region comprises a complementarity-determining region heavy chain 1 (CDR-H1) of SEQ ID NO: 543, CDR-H2 of SEQ ID NO: 1085, and CDR-H3 of SEQ ID NO: 1627; and/or a variable light chain region, wherein the variable light chain region comprises a complementarity-determining region light chain 1 (CDR-L1) of SEQ ID NO: 814, CDR-L2 of SEQ ID NO: 1356, and CDR-L3 of SEQ ID NO: 1898. In some embodiments, the variable heavy chain comprises a polypeptide consensus sequence having at least 95% sequence identity to the amino acid sequence of SEQ ID NO: 1, and the variable light chain comprises a polypeptide consensus sequence having at least 95% sequence identity to the amino acid sequence of SEQ ID NO: 272. In some embodiments, the antibody or antigen binding fragment thereof binds a human RSPO1, mouse RSPO1, rat RSPO1, bovine RSPO1, or cynomolgus monkey RSPO1. In some embodiments, the human RSPO1 comprises a sequence of SEQ ID NO: 4337.

[0034] Provided herein is an antibody that competes with an antibody or antigen binding fragment of any one of claims 107-110 for binding to RSPO1, wherein the antibody binds to human RSPO1 or mouse RSPO1.

[0035] Provided herein is an antibody or an antigen binding fragment thereof that selectively binds to zinc finger DI-MC-type containing 1, transcript variant 1 (ZDHHC1) or a variant thereof, comprising at least one of: a variable heavy chain region, wherein the variable heavy chain region comprises a complementarity-determining region heavy chain 1 (CDR-H1) of SEQ ID NO: 545, CDR-H2 of SEQ ID NO: 1087, and CDR-H3 of SEQ ID NO: 1629; and/or a variable light chain region, wherein the variable light chain region comprises a complementarity-determining region light chain 1 (CDR-L1) of SEQ ID NO: 816, CDR-L2 of SEQ ID NO: 1358, and CDR-L3 of SEQ ID NO: 1900. In some embodiments, the variable heavy chain comprises a polypeptide consensus sequence having at least 95% sequence identity to the amino acid sequence of SEQ ID NO: 3, and the variable light chain comprises a polypeptide consensus sequence having at least 95% sequence identity to the amino acid sequence of SEQ ID NO: 274. In some embodiments, the antibody or antigen binding fragment thereof binds a human ZDHHC1, mouse ZDHHC1, rat ZDHHC1, bovine ZDHHC1, or cynomolgus monkey ZDHHC1. In some embodiments, the human ZDHHC1 comprises a sequence of SEQ ID NO: 4338.

[0036] Provided herein is an antibody that competes with an antibody or antigen binding fragment of any one of claims 112-115 for binding to ZDHHC1, wherein the antibody binds to human ZDHHC1 or mouse ZDHHC1.

[0037] Provided herein is an antibody or an antigen binding fragment thereof that selectively binds to retinoid X receptor alpha, transcript variant 1 (RXRA) or a variant thereof, comprising at least one of: a variable heavy chain region, wherein the variable heavy chain region comprises a complementarity-determining region heavy chain 1 (CDR-H1) of SEQ ID NO: 546, CDR-H2 of SEQ ID NO: 1088, and CDR-H3 of SEQ ID NO: 1630; and/or a variable light chain region, wherein the variable light chain region comprises a complementarity-determining region light chain 1 (CDR-L1) of SEQ ID NO: 817, CDR-L2 of SEQ ID NO: 1359, and CDR-L3 of SEQ ID NO: 1901. In some embodiments, the variable heavy chain comprises a polypeptide consensus sequence having at least 95% sequence identity to the amino acid sequence of SEQ ID NO: 4, and the variable light chain comprises a polypeptide consensus sequence having at least 95% sequence identity to the amino acid sequence of SEQ ID NO: 275. In some embodiments, the antibody or antigen binding fragment thereof binds a human RXRA, mouse RXRA, rat RXRA, bovine RXRA, or cynomolgus monkey RXRA. In some embodiments, the human RXRA comprises a sequence of SEQ ID NO: 4339.

[0038] Provided herein is an antibody that competes with an antibody or antigen binding fragment of any one of claims 117-120 for binding to RXRA, wherein the antibody binds to human RXRA or mouse RXRA.

[0039] Provided herein is an antibody or an antigen binding fragment thereof that selectively binds to retinoid X receptor gamma, transcript variant 1 (RXRG) or a variant thereof, comprising at least one of: a variable heavy chain region, wherein the variable heavy chain region comprises a complementarity-determining region heavy chain 1 (CDR-H1) of SEQ ID NO: 546, CDR-H2 of SEQ ID NO: 1088, and CDR-H3 of SEQ ID NO: 1630; and/or a variable light chain region, wherein the variable light chain region comprises a complementarity-determining region light chain 1 (CDR-L1) of SEQ ID NO: 817, CDR-L2 of SEQ ID NO: 1359, and CDR-L3 of SEQ ID NO: 1901. In some embodiments, the variable heavy chain comprises a polypeptide consensus sequence having at least 95% sequence identity to the amino acid sequence of SEQ ID NO: 4, and the variable light chain comprises a polypeptide consensus sequence having at least 95% sequence identity to the amino acid sequence of SEQ ID NO: 275. In some embodiments, the antibody or antigen binding fragment thereof binds a human RXRG, mouse RXRG, rat RXRG, bovine RXRG, or cynomolgus monkey RXRG. In some embodiments, the human RXRG comprises a sequence of SEQ ID NO: 4340.

[0040] Provided herein is an antibody that competes with an antibody or antigen binding fragment of any one of claims 122-125 for binding to RXRG, wherein the antibody binds to human RXRG or mouse RXRG.

[0041] Provided herein is an antibody or an antigen binding fragment thereof that selectively binds to transmembrane protein 154 (TMEM154) or a variant thereof, comprising at least one of: a variable heavy chain region, wherein the variable heavy chain region comprises a complementarity-determining region heavy chain 1 (CDR-H1) of SEQ ID NO: 547, CDR-H2 of SEQ ID NO: 1089, and CDR-H3 of SEQ ID NO: 1631; and/or a variable light chain region, wherein the variable light chain region comprises a complementarity-determining region light chain 1 (CDR-L1) of SEQ ID NO: 818, CDR-L2 of SEQ ID NO: 1360, and CDR-L3 of SEQ ID NO: 1902. In some embodiments, the variable heavy chain comprises a polypeptide consensus sequence having at least 95% sequence identity to the amino acid sequence of SEQ ID NO: 5, and the variable light chain comprises a polypeptide consensus sequence having at least 95% sequence identity to the amino acid sequence of SEQ ID NO: 276. In some embodiments, the antibody or antigen binding fragment thereof binds a human TMEM154, mouse TMEM154, rat TMEM154, bovine TMEM154, or cynomolgus monkey TMEM154. In some embodiments, the human TMEM154 comprises a sequence of SEQ ID NO: 4341.

[0042] Provided herein is an antibody that competes with an antibody or antigen binding fragment of any one of claims 127-130 for binding to TMEM154, wherein the antibody binds to human TMEM154 or mouse TMEM154.

[0043] Provided herein is an antibody or an antigen binding fragment thereof that selectively binds to SNAP associated protein, transcript variant 1 (SNAPIN) or a variant thereof, comprising at least one of: a variable heavy chain region, wherein the variable heavy chain region comprises a complementarity-determining region heavy chain 1 (CDR-H1) of SEQ ID NO: 548, CDR-H2 of SEQ ID NO: 1090, and CDR-H3 of SEQ ID NO: 1632; and/or a variable light chain region, wherein the variable light chain region comprises a complementarity-determining region light chain 1 (CDR-L1) of SEQ ID NO: 819, CDR-L2 of SEQ ID NO: 1361, and CDR-L3 of SEQ ID NO: 1903. In some embodiments, the variable heavy chain comprises a polypeptide consensus sequence having at least 95% sequence identity to the amino acid sequence of SEQ ID NO: 6, and the variable light chain comprises a polypeptide consensus sequence having at least 95% sequence identity to the amino acid sequence of SEQ ID NO: 277. In some embodiments, the antibody or antigen binding fragment thereof binds a human SNAPIN, mouse SNAPIN, rat SNAPIN, bovine SNAPIN, or cynomolgus monkey SNAPIN. In some embodiments, the human SNAPIN comprises a sequence of SEQ ID NO: 4342.

[0044] Provided herein is an antibody that competes with an antibody or antigen binding fragment of any one of claims 132-135 for binding to SNAPIN, wherein the antibody binds to human SNAPIN or mouse SNAPIN.

[0045] Provided herein is an antibody or an antigen binding fragment thereof that selectively binds to glycogen phosphorylase L, transcript variant 1 (PYGL) or a variant thereof, comprising at least one of: a variable heavy chain region, wherein the variable heavy chain region comprises a complementarity-determining region heavy chain 1 (CDR-H1) of SEQ ID NO: 549, CDR-H2 of SEQ ID NO: 1091, and CDR-H3 of SEQ ID NO: 1633; and/or a variable light chain region, wherein the variable light chain region comprises a complementarity-determining region light chain 1 (CDR-L1) of SEQ ID NO: 820, CDR-L2 of SEQ ID NO: 1362, and CDR-L3 of SEQ ID NO: 1904. In some embodiments, the variable heavy chain comprises a polypeptide consensus sequence having at least 95% sequence identity to the amino acid sequence of SEQ ID NO: 7, and the variable light chain comprises a polypeptide consensus sequence having at least 95% sequence identity to the amino acid sequence of SEQ ID NO: 278. In some embodiments, the antibody or antigen binding fragment thereof binds a human PYGL, mouse PYGL, rat PYGL, bovine PYGL, or cynomolgus monkey PYGL. In some embodiments, the human PYGL comprises a sequence of SEQ ID NO: 4343.

[0046] Provided herein is an antibody that competes with an antibody or antigen binding fragment of any one of claims 137-140 for binding to PYGL, wherein the antibody binds to human PYGL or mouse PYGL.

[0047] Provided herein is an antibody or an antigen binding fragment thereof that selectively binds to Reticulocalbin 3 (RCN3) or a variant thereof, comprising at least one of: a variable heavy chain region, wherein the variable heavy chain region comprises a complementarity-determining region heavy chain 1 (CDR-H1) of SEQ ID NO: 549, CDR-H2 of SEQ ID NO: 1091, and CDR-H3 of SEQ ID NO: 1633; and/or a variable light chain region, wherein the variable light chain region comprises a complementarity-determining region light chain 1 (CDR-L1) of SEQ ID NO: 820, CDR-L2 of SEQ ID NO: 1362, and CDR-L3 of SEQ ID NO: 1904. In some embodiments, the variable heavy chain comprises a polypeptide consensus sequence having at least 95% sequence identity to the amino acid sequence of SEQ ID NO: 7, and the variable light chain comprises a polypeptide consensus sequence having at least 95% sequence identity to the amino acid sequence of SEQ ID NO: 278. In some embodiments, the antibody or antigen binding fragment thereof binds a human RCN3, mouse RCN3, rat RCN3, bovine RCN3, or cynomolgus monkey RCN3. In some embodiments, the human RCN3 comprises a sequence of SEQ ID NO: 4344.

[0048] Provided herein is an antibody that competes with an antibody or antigen binding fragment of any one of claims 142-145 for binding to RCN3, wherein the antibody binds to human RCN3 or mouse RCN3.

[0049] Provided herein is an antibody or an antigen binding fragment thereof that selectively binds to synaptotagmin 12, transcript variant X4 (SYT12) or a variant thereof, comprising at least one of: a variable heavy chain region, wherein the variable heavy chain region comprises a complementarity-determining region heavy chain 1 (CDR-H1) of SEQ ID NO: 549, CDR-H2 of SEQ ID NO: 1091, and CDR-H3 of SEQ ID NO: 1633; and/or a variable light chain region, wherein the variable light chain region comprises a complementarity-determining region light chain 1 (CDR-L1) of SEQ ID NO: 820, CDR-L2 of SEQ ID NO: 1362, and CDR-L3 of SEQ ID NO: 1904. In some embodiments, the variable heavy chain comprises a polypeptide consensus sequence having at least 95% sequence identity to the amino acid sequence of SEQ ID NO: 7, and the variable light chain comprises a polypeptide consensus sequence having at least 95% sequence identity to the amino acid sequence of SEQ ID NO: 278. In some embodiments, the antibody or antigen binding fragment thereof binds a human SYT12, mouse SYT12, rat SYT12, bovine SYT12, or cynomolgus monkey SYT12. In some embodiments, the human SYT12 comprises a sequence of SEQ ID NO: 4345.

[0050] Provided herein is an antibody that competes with an antibody or antigen binding fragment of any one of claims 147-150 for binding to SYT12, wherein the antibody binds to human SYT12 or mouse SYT12.

[0051] Provided herein is an antibody or an antigen binding fragment thereof that selectively binds to Nuclear receptor subfamily 2 group f member 6 (Nr2f6) or a variant thereof, comprising at least one of:

[0052] a variable heavy chain region, wherein the variable heavy chain region comprises a complementarity-determining region heavy chain 1 (CDR-H1) of SEQ ID NO: 550, CDR-H2 of SEQ ID NO: 1092, and CDR-H3 of SEQ ID NO: 1634; and/or a variable light chain region, wherein the variable light chain region comprises a complementarity-determining region light chain 1 (CDR-L1) of SEQ ID NO: 821, CDR-L2 of SEQ ID NO: 1363, and CDR-L3 of SEQ ID NO: 1905. In some embodiments, the variable heavy chain comprises a polypeptide consensus sequence having at least 95% sequence identity to the amino acid sequence of SEQ ID NO: 8, and the variable light chain comprises a polypeptide consensus sequence having at least 95% sequence identity to the amino acid sequence of SEQ ID NO: 279. In some embodiments, the antibody or antigen binding fragment thereof binds a human Nr2f6, mouse Nr2f6, rat Nr2f6, bovine Nr2f6, or cynomolgus monkey Nr2f6. In some embodiments, the human Nr2f6 comprises a sequence of SEQ ID NO: 4346.

[0053] Provided herein is an antibody that competes with an antibody or antigen binding fragment of any one of claims 152-155 for binding to Nr2f6, wherein the antibody binds to human Nr2f6 or mouse Nr2f6.

[0054] Provided herein is an antibody or an antigen binding fragment thereof that selectively binds to protein phosphatase 1 regulatory subunit 13 like, transcript variant 2 (PPP1R13L) or a variant thereof, comprising at least one of: a variable heavy chain region, wherein the variable heavy chain region comprises a complementarity-determining region heavy chain 1 (CDR-H1) of SEQ ID NO: 550, CDR-H2 of SEQ ID NO: 1092, and CDR-H3 of SEQ ID NO: 1634; and/or a variable light chain region, wherein the variable light chain region comprises a complementarity-determining region light chain 1 (CDR-L1) of SEQ ID NO: 821, CDR-L2 of SEQ ID NO: 1363, and CDR-L3 of SEQ ID NO: 1905. In some embodiments, the variable heavy chain comprises a polypeptide consensus sequence having at least 95% sequence identity to the amino acid sequence of SEQ ID NO: 8, and the variable light chain comprises a polypeptide consensus sequence having at least 95% sequence identity to the amino acid sequence of SEQ ID NO: 279. In some embodiments, the antibody or antigen binding fragment thereof binds a human PPP1R13L, mouse PPP1R13L, rat PPP1R13L, bovine PPP1R13L, or cynomolgus monkey PPP1R13L. In some embodiments, the human PPP1R13L comprises a sequence of SEQ ID NO: 4347.

[0055] Provided herein is an antibody that competes with an antibody or antigen binding fragment of any one of claims 157-160 for binding to PPP1R13L, wherein the antibody binds to human PPP1R13L or mouse PPP1R13L.

[0056] Provided herein is an antibody or an antigen binding fragment thereof that selectively binds to olfactory receptor family 6 subfamily Q member 1 (gene/pseudogene) (OR6Q1) or a variant thereof, comprising at least one of: a variable heavy chain region, wherein the variable heavy chain region comprises a complementarity-determining region heavy chain 1 (CDR-H1) of SEQ ID NO: 552, CDR-H2 of SEQ ID NO: 1094, and CDR-H3 of SEQ ID NO: 1636; and/or a variable light chain region, wherein the variable light chain region comprises a complementarity-determining region light chain 1 (CDR-L1) of SEQ ID NO: 823, CDR-L2 of SEQ ID NO: 1365, and CDR-L3 of SEQ ID NO: 1907. In some embodiments, the variable heavy chain comprises a polypeptide consensus sequence having at least 95% sequence identity to the amino acid sequence of SEQ ID NO: 10, and the variable light chain comprises a polypeptide consensus sequence having at least 95% sequence identity to the amino acid sequence of SEQ ID NO: 281. In some embodiments, the antibody or antigen binding fragment thereof binds a human OR6Q1, mouse OR6Q1, rat OR6Q1, bovine OR6Q1, or cynomolgus monkey OR6Q1. In some embodiments, the human OR6Q1 comprises a sequence of SEQ ID NO: 4348.

[0057] Provided herein is an antibody that competes with an antibody or antigen binding fragment of any one of claims 162-165 for binding to OR6Q1, wherein the antibody binds to human OR6Q1 or mouse OR6Q1.

[0058] Provided herein is an antibody or an antigen binding fragment thereof that selectively binds to cancer/testis antigen 1A (CTAG1A) or a variant thereof, comprising at least one of: a variable heavy chain region, wherein the variable heavy chain region comprises a complementarity-determining region heavy chain 1 (CDR-H1) of SEQ ID NO: 553, CDR-H2 of SEQ ID NO: 1095, and CDR-H3 of SEQ ID NO: 1637; and/or a variable light chain region, wherein the variable light chain region comprises a complementarity-determining region light chain 1 (CDR-L1) of SEQ ID NO: 824, CDR-L2 of SEQ ID NO: 1366, and CDR-L3 of SEQ ID NO: 1908. In some embodiments, the variable heavy chain comprises a polypeptide consensus sequence having at least 95% sequence identity to the amino acid sequence of SEQ ID NO: 11, and the variable light chain comprises a polypeptide consensus sequence having at least 95% sequence identity to the amino acid sequence of SEQ ID NO: 282. In some embodiments, the antibody or antigen binding fragment thereof binds a human CTAG1A, mouse CTAG1A, rat CTAG1A, bovine CTAG1A, or cynomolgus monkey CTAG1A. In some embodiments, the human CTAG1A comprises a sequence of SEQ ID NO: 4349.

[0059] Provided herein is an antibody that competes with an antibody or antigen binding fragment of any one of claims 167-170 for binding to CTAG1A, wherein the antibody binds to human CTAG1A or mouse CTAG1A.

[0060] Provided herein is an antibody or an antigen binding fragment thereof that selectively binds to cancer/testis antigen 1A (CTAG1A) or a variant thereof, comprising at least one of: a variable heavy chain region, wherein the variable heavy chain region comprises a complementarity-determining region heavy chain 1 (CDR-H1) of SEQ ID NO: 554, CDR-H2 of SEQ ID NO: 1096, and CDR-H3 of SEQ ID NO: 1638; and/or a variable light chain region, wherein the variable light chain region comprises a complementarity-determining region light chain 1 (CDR-L1) of SEQ ID NO: 825, CDR-L2 of SEQ ID NO: 1367, and CDR-L3 of SEQ ID NO: 1909. In some embodiments, the variable heavy chain comprises a polypeptide consensus sequence having at least 95% sequence identity to the amino acid sequence of SEQ ID NO: 12, and the variable light chain comprises a polypeptide consensus sequence having at least 95% sequence identity to the amino acid sequence of SEQ ID NO: 283. In some embodiments, the antibody or antigen binding fragment thereof binds a human CTAG1A, mouse CTAG1A, rat CTAG1A, bovine CTAG1A, or cynomolgus monkey CTAG1A. In some embodiments, the human CTAG1A comprises a sequence of SEQ ID NO: 4349.

[0061] Provided herein is an antibody that competes with an antibody or antigen binding fragment of any one of claims 172-175 for binding to CTAG1A, wherein the antibody binds to human CTAG1A or mouse CTAG1A.

[0062] Provided herein is an antibody or an antigen binding fragment thereof that selectively binds to 5-hydroxytryptamine receptor 1E (HTR1E) or a variant thereof, comprising at least one of: a variable heavy chain region, wherein the variable heavy chain region comprises a complementarity-determining region heavy chain 1 (CDR-H1) of SEQ ID NO: 555, CDR-H2 of SEQ ID NO: 1097, and CDR-H3 of SEQ ID NO: 1639; and/or a variable light chain region, wherein the variable light chain region comprises a complementarity-determining region light chain 1 (CDR-L1) of SEQ ID NO: 826, CDR-L2 of SEQ ID NO: 1368, and CDR-L3 of SEQ ID NO: 1910. In some embodiments, the variable heavy chain comprises a polypeptide consensus sequence having at least 95% sequence identity to the amino acid sequence of SEQ ID NO: 13, and the variable light chain comprises a polypeptide consensus sequence having at least 95% sequence identity to the amino acid sequence of SEQ ID NO: 284. In some embodiments, the antibody or antigen binding fragment thereof binds a human HTR1E, mouse HTR1E, rat HTR1E, bovine HTR1E, or cynomolgus monkey HTR1E. In some embodiments, the human HTR1E comprises a sequence of SEQ ID NO: 4350.

[0063] Provided herein is an antibody that competes with an antibody or antigen binding fragment of any one of claims 177-180 for binding to HTR1E, wherein the antibody binds to human HTR1E or mouse HTR1E.

[0064] Provided herein is an antibody or an antigen binding fragment thereof that selectively binds to microfibril associated protein 3, transcript variant 3 (MFAP3) or a variant thereof, comprising at least one of: a variable heavy chain region, wherein the variable heavy chain region comprises a complementarity-determining region heavy chain 1 (CDR-H1) of SEQ ID NO: 557, CDR-H2 of SEQ ID NO: 1099, and CDR-H3 of SEQ ID NO: 1641; and/or a variable light chain region, wherein the variable light chain region comprises a complementarity-determining region light chain 1 (CDR-L1) of SEQ ID NO: 828, CDR-L2 of SEQ ID NO: 1370, and CDR-L3 of SEQ ID NO: 1912. In some embodiments, the variable heavy chain comprises a polypeptide consensus sequence having at least 95% sequence identity to the amino acid sequence of SEQ ID NO: 15, and the variable light chain comprises a polypeptide consensus sequence having at least 95% sequence identity to the amino acid sequence of SEQ ID NO: 286. In some embodiments, the antibody or antigen binding fragment thereof binds a human MFAP3, mouse MFAP3, rat MFAP3, bovine MFAP3, or cynomolgus monkey MFAP3. In some embodiments, the human MFAP3 comprises a sequence of SEQ ID NO: 4351.

[0065] Provided herein is an antibody that competes with an antibody or antigen binding fragment of any one of claims 182-185 for binding to MFAP3, wherein the antibody binds to human MFAP3 or mouse MFAP3.

[0066] Provided herein is an antibody or an antigen binding fragment thereof that selectively binds to hyaluronan binding protein 4 (HABP4) or a variant thereof, comprising at least one of: a variable heavy chain region, wherein the variable heavy chain region comprises a complementarity-determining region heavy chain 1 (CDR-H1) of SEQ ID NO: 559, CDR-H2 of SEQ ID NO: 1101, and CDR-H3 of SEQ ID NO: 1643; and/or

[0067] a variable light chain region, wherein the variable light chain region comprises a complementarity-determining region light chain 1 (CDR-L1) of SEQ ID NO: 830, CDR-L2 of SEQ ID NO: 1372, and CDR-L3 of SEQ ID NO: 1914. In some embodiments, the variable heavy chain comprises a polypeptide consensus sequence having at least 95% sequence identity to the amino acid sequence of SEQ ID NO: 17, and the variable light chain comprises a polypeptide consensus sequence having at least 95% sequence identity to the amino acid sequence of SEQ ID NO: 288. In some embodiments, the antibody or antigen binding fragment thereof binds a human HABP4, mouse HABP4, rat HABP4, bovine HABP4, or cynomolgus monkey HABP4. In some embodiments, the human HABP4 comprises a sequence of SEQ ID NO: 4352.

[0068] Provided herein is an antibody that competes with an antibody or antigen binding fragment of any one of claims 187-190 for binding to HABP4, wherein the antibody binds to human HABP4 or mouse HABP4.

[0069] Provided herein is an antibody or an antigen binding fragment thereof that selectively binds to glucuronidase, beta pseudogene (BC025996.2_frag) or a variant thereof, comprising at least one of: a variable heavy chain region, wherein the variable heavy chain region comprises a complementarity-determining region heavy chain 1 (CDR-H1) of SEQ ID NO: 561, CDR-H2 of SEQ ID NO: 1103, and CDR-H3 of SEQ ID NO: 1645; and/or a variable light chain region, wherein the variable light chain region comprises a complementarity-determining region light chain 1 (CDR-L1) of SEQ ID NO: 832, CDR-L2 of SEQ ID NO: 1374, and CDR-L3 of SEQ ID NO: 1916. In some embodiments, the variable heavy chain comprises a polypeptide consensus sequence having at least 95% sequence identity to the amino acid sequence of SEQ ID NO: 19, and the variable light chain comprises a polypeptide consensus sequence having at least 95% sequence identity to the amino acid sequence of SEQ ID NO: 290. In some embodiments, the antibody or antigen binding fragment thereof binds a human BC025996.2_frag, mouse BC025996.2_frag, rat BC025996.2_frag, bovine BC025996.2_frag, or cynomolgus monkey BC025996.2_frag. In some embodiments, the human BC025996.2_frag comprises a sequence of SEQ ID NO: 4353.

[0070] Provided herein is an antibody that competes with an antibody or antigen binding fragment of any one of claims 192-195 for binding to BC025996.2_frag, wherein the antibody binds to human BC025996.2_frag or mouse BC025996.2_frag.

[0071] Provided herein is an antibody or an antigen binding fragment thereof that selectively binds to dual specificity phosphatase 12 (DUSP12) or a variant thereof, comprising at least one of: a variable heavy chain region, wherein the variable heavy chain region comprises a complementarity-determining region heavy chain 1 (CDR-H1) of SEQ ID NO: 562, CDR-H2 of SEQ ID NO: 1104, and CDR-H3 of SEQ ID NO: 1646; and/or a variable light chain region, wherein the variable light chain region comprises a complementarity-determining region light chain 1 (CDR-L1) of SEQ ID NO: 833, CDR-L2 of SEQ ID NO: 1375, and CDR-L3 of SEQ ID NO: 1917. In some embodiments, the variable heavy chain comprises a polypeptide consensus sequence having at least 95% sequence identity to the amino acid sequence of SEQ ID NO: 20, and the variable light chain comprises a polypeptide consensus sequence having at least 95% sequence identity to the amino acid sequence of SEQ ID NO: 291. In some embodiments, the antibody or antigen binding fragment thereof binds a human DUSP12, mouse DUSP12, rat DUSP12, bovine DUSP12, or cynomolgus monkey DUSP12. In some embodiments, the human DUSP12 comprises a sequence of SEQ ID NO: 4354.

[0072] Provided herein is an antibody that competes with an antibody or antigen binding fragment of any one of claims 197-200 for binding to DUSP12, wherein the antibody binds to human DUSP12 or mouse DUSP12.

[0073] Provided herein is an antibody or an antigen binding fragment thereof that selectively binds to actinin alpha 1, transcript variant 2 (ACTN1) or a variant thereof, comprising at least one of: a variable heavy chain region, wherein the variable heavy chain region comprises a complementarity-determining region heavy chain 1 (CDR-H1) of SEQ ID NO: 562, CDR-H2 of SEQ ID NO: 1104, and CDR-H3 of SEQ ID NO: 1646; and/or a variable light chain region, wherein the variable light chain region comprises a complementarity-determining region light chain 1 (CDR-L1) of SEQ ID NO: 833, CDR-L2 of SEQ ID NO: 1375, and CDR-L3 of SEQ ID NO: 1917. In some embodiments, the variable heavy chain comprises a polypeptide consensus sequence having at least 95% sequence identity to the amino acid sequence of SEQ ID NO: 20, and the variable light chain comprises a polypeptide consensus sequence having at least 95% sequence identity to the amino acid sequence of SEQ ID NO: 291. In some embodiments, the antibody or antigen binding fragment thereof binds a human ACTN1, mouse ACTN1, rat ACTN1, bovine ACTN1, or cynomolgus monkey ACTN1. In some embodiments, the human ACTN1 comprises a sequence of SEQ ID NO: 4355.

[0074] Provided herein is an antibody that competes with an antibody or antigen binding fragment of any one of claims 202-205 for binding to ACTN1, wherein the antibody binds to human ACTN1 or mouse ACTN1.

[0075] Provided herein is an antibody or an antigen binding fragment thereof that selectively binds to zinc finger with KRAB and SCAN domains 4, transcript variant X1 (ZKSCAN4) or a variant thereof, comprising at least one of: a variable heavy chain region, wherein the variable heavy chain region comprises a complementarity-determining region heavy chain 1 (CDR-H1) of SEQ ID NO: 564, CDR-H2 of SEQ ID NO: 1106, and CDR-H3 of SEQ ID NO: 1648; and/or a variable light chain region, wherein the variable light chain region comprises a complementarity-determining region light chain 1 (CDR-L1) of SEQ ID NO: 835, CDR-L2 of SEQ ID NO: 1377, and CDR-L3 of SEQ ID NO: 1919. In some embodiments, the variable heavy chain comprises a polypeptide consensus sequence having at least 95% sequence identity to the amino acid sequence of SEQ ID NO: 22, and the variable light chain comprises a polypeptide consensus sequence having at least 95% sequence identity to the amino acid sequence of SEQ ID NO: 293. In some embodiments, the antibody or antigen binding fragment thereof binds a human ZKSCAN4, mouse ZKSCAN4, rat ZKSCAN4, bovine ZKSCAN4, or cynomolgus monkey ZKSCAN4. In some embodiments, the human ZKSCAN4 comprises a sequence of SEQ ID NO: 4356.

[0076] Provided herein is an antibody that competes with an antibody or antigen binding fragment of any one of claims 207-210 for binding to ZKSCAN4, wherein the antibody binds to human ZKSCAN4 or mouse ZKSCAN4.

[0077] Provided herein is an antibody or an antigen binding fragment thereof that selectively binds to PNMA family member 5, transcript variant 2 (PNMA5) or a variant thereof, comprising at least one of: a variable heavy chain region, wherein the variable heavy chain region comprises a complementarity-determining region heavy chain 1 (CDR-H1) of SEQ ID NO: 566, CDR-H2 of SEQ ID NO: 1108, and CDR-H3 of SEQ ID NO: 1650; and/or a variable light chain region, wherein the variable light chain region comprises a complementarity-determining region light chain 1 (CDR-L1) of SEQ ID NO: 837, CDR-L2 of SEQ ID NO: 1379, and CDR-L3 of SEQ ID NO: 1921. In some embodiments, the variable heavy chain comprises a polypeptide consensus sequence having at least 95% sequence identity to the amino acid sequence of SEQ ID NO: 24, and the variable light chain comprises a polypeptide consensus sequence having at least 95% sequence identity to the amino acid sequence of SEQ ID NO: 295. In some embodiments, the antibody or antigen binding fragment thereof binds a human PNMA5, mouse PNMA5, rat PNMA5, bovine PNMA5, or cynomolgus monkey PNMA5. In some embodiments, the human PNMA5 comprises a sequence of SEQ ID NO: 4357.

[0078] Provided herein is an antibody that competes with an antibody or antigen binding fragment of any one of claims 212-215 for binding to PNMA5, wherein the antibody binds to human PNMA5 or mouse PNMA5.

[0079] Provided herein is an antibody or an antigen binding fragment thereof that selectively binds to kelch like family member 40 (KLHL40) or a variant thereof, comprising at least one of: a variable heavy chain region, wherein the variable heavy chain region comprises a complementarity-determining region heavy chain 1 (CDR-H1) of SEQ ID NO: 567, CDR-H2 of SEQ ID NO: 1109, and CDR-H3 of SEQ ID NO: 1651; and/or a variable light chain region, wherein the variable light chain region comprises a complementarity-determining region light chain 1 (CDR-L1) of SEQ ID NO: 838, CDR-L2 of SEQ ID NO: 1380, and CDR-L3 of SEQ ID NO: 1922. In some embodiments, the variable heavy chain comprises a polypeptide consensus sequence having at least 95% sequence identity to the amino acid sequence of SEQ ID NO: 25, and the variable light chain comprises a polypeptide consensus sequence having at least 95% sequence identity to the amino acid sequence of SEQ ID NO: 296. In some embodiments, the antibody or antigen binding fragment thereof binds a human KLHL40, mouse KLHL40, rat KLHL40, bovine KLHL40, or cynomolgus monkey KLHL40. In some embodiments, the human KLHL40 comprises a sequence of SEQ ID NO: 4358.

[0080] Provided herein is an antibody that competes with an antibody or antigen binding fragment of any one of claims 217-220 for binding to KLHL40, wherein the antibody binds to human KLHL40 or mouse KLHL40.

[0081] Provided herein is an antibody or an antigen binding fragment thereof that selectively binds to membrane palmitoylated protein 2, transcript variant 3 (MPP2) or a variant thereof, comprising at least one of: a variable heavy chain region, wherein the variable heavy chain region comprises a complementarity-determining region heavy chain 1 (CDR-H1) of SEQ ID NO: 567, CDR-H2 of SEQ ID NO: 1109, and CDR-H3 of SEQ ID NO: 1651; and/or a variable light chain region, wherein the variable light chain region comprises a complementarity-determining region light chain 1 (CDR-L1) of SEQ ID NO: 838, CDR-L2 of SEQ ID NO: 1380, and CDR-L3 of SEQ ID NO: 1922. In some embodiments, the variable heavy chain comprises a polypeptide consensus sequence having at least 95% sequence identity to the amino acid sequence of SEQ ID NO: 25, and the variable light chain comprises a polypeptide consensus sequence having at least 95% sequence identity to the amino acid sequence of SEQ ID NO: 296. In some embodiments, the antibody or antigen binding fragment thereof binds a human MPP2, mouse MPP2, rat MPP2, bovine MPP2, or cynomolgus monkey MPP2. In some embodiments, the human MPP2 comprises a sequence of SEQ ID NO: 4359.

[0082] Provided herein is an antibody that competes with an antibody or antigen binding fragment of any one of claims 222-225 for binding to MPP2, wherein the antibody binds to human MPP2 or mouse MPP2.

[0083] Provided herein is an antibody or an antigen binding fragment thereof that selectively binds to butyrophilin subfamily 1 member A1 (BTN1A1) or a variant thereof, comprising at least one of: a variable heavy chain region, wherein the variable heavy chain region comprises a complementarity-determining region heavy chain 1 (CDR-H1) of SEQ ID NO: 568, CDR-H2 of SEQ ID NO: 1110, and CDR-H3 of SEQ ID NO: 1652; and/or a variable light chain region, wherein the variable light chain region comprises a complementarity-determining region light chain 1 (CDR-L1) of SEQ ID NO: 839, CDR-L2 of SEQ ID NO: 1381, and CDR-L3 of SEQ ID NO: 1923. In some embodiments, the variable heavy chain comprises a polypeptide consensus sequence having at least 95% sequence identity to the amino acid sequence of SEQ ID NO: 26, and the variable light chain comprises a polypeptide consensus sequence having at least 95% sequence identity to the amino acid sequence of SEQ ID NO: 297. In some embodiments, the antibody or antigen binding fragment thereof binds a human BTN1A1, mouse BTN1A1, rat BTN1A1, bovine BTN1A1, or cynomolgus monkey BTN1A1. In some embodiments, the human BTN1A1 comprises a sequence of SEQ ID NO: 4360.

[0084] Provided herein is an antibody that competes with an antibody or antigen binding fragment of any one of claims 227-230 for binding to BTN1A1, wherein the antibody binds to human BTN1A1 or mouse BTN1A1.

[0085] Provided herein is an antibody or an antigen binding fragment thereof that selectively binds to peroxisomal biogenesis factor 11 gamma, transcript variant 1 (PEX11G) or a variant thereof, comprising at least one of: a variable heavy chain region, wherein the variable heavy chain region comprises a complementarity-determining region heavy chain 1 (CDR-H1) of SEQ ID NO: 569, CDR-H2 of SEQ ID NO: 1111, and CDR-H3 of SEQ ID NO: 1653; and/or a variable light chain region, wherein the variable light chain region comprises a complementarity-determining region light chain 1 (CDR-L1) of SEQ ID NO: 840, CDR-L2 of SEQ ID NO: 1382, and CDR-L3 of SEQ ID NO: 1924. In some embodiments, the variable heavy chain comprises a polypeptide consensus sequence having at least 95% sequence identity to the amino acid sequence of SEQ ID NO: 27, and the variable light chain comprises a polypeptide consensus sequence having at least 95% sequence identity to the amino acid sequence of SEQ ID NO: 298. In some embodiments, the antibody or antigen binding fragment thereof binds a human PEX11G, mouse PEX11G, rat PEX11G, bovine PEX11G, or cynomolgus monkey PEX11G. In some embodiments, the human PEX11G comprises a sequence of SEQ ID NO: 4361.

[0086] Provided herein is an antibody that competes with an antibody or antigen binding fragment of any one of claims 232-235 for binding to PEX11G, wherein the antibody binds to human PEX11G or mouse PEX11G.

[0087] Provided herein is an antibody or an antigen binding fragment thereof that selectively binds to zinc finger protein 8 (ZNF8) or a variant thereof, comprising at least one of: a variable heavy chain region, wherein the variable heavy chain region comprises a complementarity-determining region heavy chain 1 (CDR-H1) of SEQ ID NO: 572, CDR-H2 of SEQ ID NO: 1114, and CDR-H3 of SEQ ID NO: 1656; and/or a variable light chain region, wherein the variable light chain region comprises a complementarity-determining region light chain 1 (CDR-L1) of SEQ ID NO: 843, CDR-L2 of SEQ ID NO: 1385, and CDR-L3 of SEQ ID NO: 1927. In some embodiments, the variable heavy chain comprises a polypeptide consensus sequence having at least 95% sequence identity to the amino acid sequence of SEQ ID NO: 30, and the variable light chain comprises a polypeptide consensus sequence having at least 95% sequence identity to the amino acid sequence of SEQ ID NO: 301. In some embodiments, the antibody or antigen binding fragment thereof binds a human ZNF8, mouse ZNF8, rat ZNF8, bovine ZNF8, or cynomolgus monkey ZNF8. In some embodiments, the human ZNF8 comprises a sequence of SEQ ID NO: 4362.

[0088] Provided herein is an antibody that competes with an antibody or antigen binding fragment of any one of claims 237-240 for binding to ZNF8, wherein the antibody binds to human ZNF8 or mouse ZNF8.

[0089] Provided herein is an antibody or an antigen binding fragment thereof that selectively binds to SATB homeobox 2, transcript variant 2 (SATB2) or a variant thereof, comprising at least one of: a variable heavy chain region, wherein the variable heavy chain region comprises a complementarity-determining region heavy chain 1 (CDR-H1) of SEQ ID NO: 572, CDR-H2 of SEQ ID NO: 1114, and CDR-H3 of SEQ ID NO: 1656; and/or a variable light chain region, wherein the variable light chain region comprises a complementarity-determining region light chain 1 (CDR-L1) of SEQ ID NO: 843, CDR-L2 of SEQ ID NO: 1385, and CDR-L3 of SEQ ID NO: 1927. In some embodiments, the variable heavy chain comprises a polypeptide consensus sequence having at least 95% sequence identity to the amino acid sequence of SEQ ID NO: 30, and the variable light chain comprises a polypeptide consensus sequence having at least 95% sequence identity to the amino acid sequence of SEQ ID NO: 301. In some embodiments, the antibody or antigen binding fragment thereof binds a human SATB2, mouse SATB2, rat SATB2, bovine SATB2, or cynomolgus monkey SATB2. In some embodiments, the human SATB2 comprises a sequence of SEQ ID NO: 4363.

[0090] Provided herein is an antibody that competes with an antibody or antigen binding fragment of any one of claims 242-245 for binding to SATB2, wherein the antibody binds to human SATB2 or mouse SATB2.

[0091] Provided herein is an antibody or an antigen binding fragment thereof that selectively binds to ganglioside induced differentiation associated protein 1, transcript variant 2 (GDAP1) or a variant thereof, comprising at least one of: a variable heavy chain region, wherein the variable heavy chain region comprises a complementarity-determining region heavy chain 1 (CDR-H1) of SEQ ID NO: 572, CDR-H2 of SEQ ID NO: 1114, and CDR-H3 of SEQ ID NO: 1656; and/or a variable light chain region, wherein the variable light chain region comprises a complementarity-determining region light chain 1 (CDR-L1) of SEQ ID NO: 843, CDR-L2 of SEQ ID NO: 1385, and CDR-L3 of SEQ ID NO: 1927. In some embodiments, the variable heavy chain comprises a polypeptide consensus sequence having at least 95% sequence identity to the amino acid sequence of SEQ ID NO: 30, and the variable light chain comprises a polypeptide consensus sequence having at least 95% sequence identity to the amino acid sequence of SEQ ID NO: 301. In some embodiments, the antibody or antigen binding fragment thereof binds a human GDAP1, mouse GDAP1, rat GDAP1, bovine GDAP1, or cynomolgus monkey GDAP1. In some embodiments, the human GDAP1 comprises a sequence of SEQ ID NO: 4364.

[0092] Provided herein is an antibody that competes with an antibody or antigen binding fragment of any one of claims 247-250 for binding to GDAP1, wherein the antibody binds to human GDAP1 or mouse GDAP1.

[0093] Provided herein is an antibody or an antigen binding fragment thereof that selectively binds to catenin alpha like 1, transcript variant 1 (CTNNAL1) or a variant thereof, comprising at least one of: a variable heavy chain region, wherein the variable heavy chain region comprises a complementarity-determining region heavy chain 1 (CDR-H1) of SEQ ID NO: 578, CDR-H2 of SEQ ID NO: 1120, and CDR-H3 of SEQ ID NO: 1662; and/or a variable light chain region, wherein the variable light chain region comprises a complementarity-determining region light chain 1 (CDR-L1) of SEQ ID NO: 849, CDR-L2 of SEQ ID NO: 1391, and CDR-L3 of SEQ ID NO: 1933. In some embodiments, the variable heavy chain comprises a polypeptide consensus sequence having at least 95% sequence identity to the amino acid sequence of SEQ ID NO: 36, and the variable light chain comprises a polypeptide consensus sequence having at least 95% sequence identity to the amino acid sequence of SEQ ID NO: 307. In some embodiments, the antibody or antigen binding fragment thereof binds a human CTNNAL1, mouse CTNNAL1, rat CTNNAL1, bovine CTNNAL1, or cynomolgus monkey CTNNAL1. In some embodiments, the human CTNNAL1 comprises a sequence of SEQ ID NO: 4365.

[0094] Provided herein is an antibody that competes with an antibody or antigen binding fragment of any one of claims 252-255 for binding to CTNNAL1, wherein the antibody binds to human CTNNAL1 or mouse CTNNAL1.

[0095] Provided herein is an antibody or an antigen binding fragment thereof that selectively binds to FA complementation group G (FANCG) or a variant thereof, comprising at least one of: a variable heavy chain region, wherein the variable heavy chain region comprises a complementarity-determining region heavy chain 1 (CDR-H1) of SEQ ID NO: 579, CDR-H2 of SEQ ID NO: 1121, and CDR-H3 of SEQ ID NO: 1663; and/or a variable light chain region, wherein the variable light chain region comprises a complementarity-determining region light chain 1 (CDR-L1) of SEQ ID NO: 850, CDR-L2 of SEQ ID NO: 1392, and CDR-L3 of SEQ ID NO: 1934. In some embodiments, the variable heavy chain comprises a polypeptide consensus sequence having at least 95% sequence identity to the amino acid sequence of SEQ ID NO: 37, and the variable light chain comprises a polypeptide consensus sequence having at least 95% sequence identity to the amino acid sequence of SEQ ID NO: 308. In some embodiments, the antibody or antigen binding fragment thereof binds a human FANCG, mouse FANCG, rat FANCG, bovine FANCG, or cynomolgus monkey FANCG. In some embodiments, the human FANCG comprises a sequence of SEQ ID NO: 4366.

[0096] Provided herein is an antibody that competes with an antibody or antigen binding fragment of any one of claims 257-260 for binding to FANCG, wherein the antibody binds to human FANCG or mouse FANCG.

[0097] Provided herein is an antibody or an antigen binding fragment thereof that selectively binds to DEAD-box helicase 18 (DDX18) or a variant thereof, comprising at least one of: a variable heavy chain region, wherein the variable heavy chain region comprises a complementarity-determining region heavy chain 1 (CDR-H1) of SEQ ID NO: 582, CDR-H2 of SEQ ID NO: 1124, and CDR-H3 of SEQ ID NO: 1666; and/or a variable light chain region, wherein the variable light chain region comprises a complementarity-determining region light chain 1 (CDR-L1) of SEQ ID NO: 853, CDR-L2 of SEQ ID NO: 1395, and CDR-L3 of SEQ ID NO: 1937. In some embodiments, the variable heavy chain comprises a polypeptide consensus sequence having at least 95% sequence identity to the amino acid sequence of SEQ ID NO: 40, and the variable light chain comprises a polypeptide consensus sequence having at least 95% sequence identity to the amino acid sequence of SEQ ID NO: 311. In some embodiments, the antibody or antigen binding fragment thereof binds a human DDX18, mouse DDX18, rat DDX18, bovine DDX18, or cynomolgus monkey DDX18. In some embodiments, the human DDX18 comprises a sequence of SEQ ID NO: 4367.

[0098] Provided herein is an antibody that competes with an antibody or antigen binding fragment of any one of claims 262-265 for binding to DDX18, wherein the antibody binds to human DDX18 or mouse DDX18.

[0099] Provided herein is an antibody or an antigen binding fragment thereof that selectively binds to syntaxin 1A, transcript variant 1 (STX1A) or a variant thereof, comprising at least one of: a variable heavy chain region, wherein the variable heavy chain region comprises a complementarity-determining region heavy chain 1 (CDR-H1) of SEQ ID NO: 582, CDR-H2 of SEQ ID NO: 1124, and CDR-H3 of SEQ ID NO: 1666; and/or a variable light chain region, wherein the variable light chain region comprises a complementarity-determining region light chain 1 (CDR-L1) of SEQ ID NO: 853, CDR-L2 of SEQ ID NO: 1395, and CDR-L3 of SEQ ID NO: 1937. In some embodiments, the variable heavy chain comprises a polypeptide consensus sequence having at least 95% sequence identity to the amino acid sequence of SEQ ID NO: 40, and the variable light chain comprises a polypeptide consensus sequence having at least 95% sequence identity to the amino acid sequence of SEQ ID NO: 311. In some embodiments, the antibody or antigen binding fragment thereof binds a human STX1A, mouse STX1A, rat STX1A, bovine STX1A, or cynomolgus monkey STX1A. In some embodiments, the human STX1A comprises a sequence of SEQ ID NO: 4368.

[0100] Provided herein is an antibody that competes with an antibody or antigen binding fragment of any one of claims 267-270 for binding to STX1A, wherein the antibody binds to human STX1A or mouse STX1A.

[0101] Provided herein is an antibody or an antigen binding fragment thereof that selectively binds to geminin DNA replication inhibitor, transcript variant 1 (GMNN) or a variant thereof, comprising at least one of: a variable heavy chain region, wherein the variable heavy chain region comprises a complementarity-determining region heavy chain 1 (CDR-H1) of SEQ ID NO: 582, CDR-H2 of SEQ ID NO: 1124, and CDR-H3 of SEQ ID NO: 1666; and/or a variable light chain region, wherein the variable light chain region comprises a complementarity-determining region light chain 1 (CDR-L1) of SEQ ID NO: 853, CDR-L2 of SEQ ID NO: 1395, and CDR-L3 of SEQ ID NO: 1937. In some embodiments, the variable heavy chain comprises a polypeptide consensus sequence having at least 95% sequence identity to the amino acid sequence of SEQ ID NO: 40, and the variable light chain comprises a polypeptide consensus sequence having at least 95% sequence identity to the amino acid sequence of SEQ ID NO: 311. In some embodiments, the antibody or antigen binding fragment thereof binds a human GMNN, mouse GMNN, rat GMNN, bovine GMNN, or cynomolgus monkey GMNN. In some embodiments, the human GMNN comprises a sequence of SEQ ID NO: 4369.

[0102] Provided herein is an antibody that competes with an antibody or antigen binding fragment of any one of claims 272-275 for binding to GMNN, wherein the antibody binds to human GMNN or mouse GMNN.

[0103] Provided herein is an antibody or an antigen binding fragment thereof that selectively binds to ubiquilin 1, transcript variant 2 (UBQLN1) or a variant thereof, comprising at least one of: a variable heavy chain region, wherein the variable heavy chain region comprises a complementarity-determining region heavy chain 1 (CDR-H1) of SEQ ID NO: 585, CDR-H2 of SEQ ID NO: 1127, and CDR-H3 of SEQ ID NO: 1669; and/or a variable light chain region, wherein the variable light chain region comprises a complementarity-determining region light chain 1 (CDR-L1) of SEQ ID NO: 856, CDR-L2 of SEQ ID NO: 1398, and CDR-L3 of SEQ ID NO: 1940. In some embodiments, the variable heavy chain comprises a polypeptide consensus sequence having at least 95% sequence identity to the amino acid sequence of SEQ ID NO: 43, and the variable light chain comprises a polypeptide consensus sequence having at least 95% sequence identity to the amino acid sequence of SEQ ID NO: 314. In some embodiments, the antibody or antigen binding fragment thereof binds a human UBQLN1, mouse UBQLN1, rat UBQLN1, bovine UBQLN1, or cynomolgus monkey UBQLN1. In some embodiments, the human UBQLN1 comprises a sequence of SEQ ID NO: 4370.

[0104] Provided herein is an antibody that competes with an antibody or antigen binding fragment of any one of claims 277-280 for binding to UBQLN1, wherein the antibody binds to human UBQLN1 or mouse UBQLN1.

[0105] Provided herein is an antibody or an antigen binding fragment thereof that selectively binds to carnosine dipeptidase 2, transcript variant 1 (CNDP2) or a variant thereof, comprising at least one of: a variable heavy chain region, wherein the variable heavy chain region comprises a complementarity-determining region heavy chain 1 (CDR-H1) of SEQ ID NO: 585, CDR-H2 of SEQ ID NO: 1127, and CDR-H3 of SEQ ID NO: 1669; and/or a variable light chain region, wherein the variable light chain region comprises a complementarity-determining region light chain 1 (CDR-L1) of SEQ ID NO: 856, CDR-L2 of SEQ ID NO: 1398, and CDR-L3 of SEQ ID NO: 1940. In some embodiments, the variable heavy chain comprises a polypeptide consensus sequence having at least 95% sequence identity to the amino acid sequence of SEQ ID NO: 43, and the variable light chain comprises a polypeptide consensus sequence having at least 95% sequence identity to the amino acid sequence of SEQ ID NO: 314. In some embodiments, the antibody or antigen binding fragment thereof binds a human CNDP2, mouse CNDP2, rat CNDP2, bovine CNDP2, or cynomolgus monkey CNDP2. In some embodiments, the human CNDP2 comprises a sequence of SEQ ID NO: 4371.

[0106] Provided herein is an antibody that competes with an antibody or antigen binding fragment of any one of claims 282-285 for binding to CNDP2, wherein the antibody binds to human CNDP2 or mouse CNDP2.

[0107] Provided herein is an antibody or an antigen binding fragment thereof that selectively binds to X-linked inhibitor of apoptosis, transcript variant 2 (XIAP) or a variant thereof, comprising at least one of: a variable heavy chain region, wherein the variable heavy chain region comprises a complementarity-determining region heavy chain 1 (CDR-H1) of SEQ ID NO: 587, CDR-H2 of SEQ ID NO: 1129, and CDR-H3 of SEQ ID NO: 1671; and/or a variable light chain region, wherein the variable light chain region comprises a complementarity-determining region light chain 1 (CDR-L1) of SEQ ID NO: 858, CDR-L2 of SEQ ID NO: 1400, and CDR-L3 of SEQ ID NO: 1942. In some embodiments, the variable heavy chain comprises a polypeptide consensus sequence having at least 95% sequence identity to the amino acid sequence of SEQ ID NO: 45, and the variable light chain comprises a polypeptide consensus sequence having at least 95% sequence identity to the amino acid sequence of SEQ ID NO: 316. In some embodiments, the antibody or antigen binding fragment thereof binds a human XIAP, mouse XIAP, rat XIAP, bovine XIAP, or cynomolgus monkey XIAP. In some embodiments, the human XIAP comprises a sequence of SEQ ID NO: 4372.

[0108] Provided herein is an antibody that competes with an antibody or antigen binding fragment of any one of claims 287-290 for binding to XIAP, wherein the antibody binds to human XIAP or mouse XIAP.

[0109] Provided herein an antibody or an antigen binding fragment thereof that selectively binds to hyaluronan binding protein 4 (HABP4) or a variant thereof, comprising at least one of: a variable heavy chain region, wherein the variable heavy chain region comprises a complementarity-determining region heavy chain 1 (CDR-H1) of SEQ ID NO: 587, CDR-H2 of SEQ ID NO: 1129, and CDR-H3 of SEQ ID NO: 1671; and/or a variable light chain region, wherein the variable light chain region comprises a complementarity-determining region light chain 1 (CDR-L1) of SEQ ID NO: 858, CDR-L2 of SEQ ID NO: 1400, and CDR-L3 of SEQ ID NO: 1942. In some embodiments, the variable heavy chain comprises a polypeptide consensus sequence having at least 95% sequence identity to the amino acid sequence of SEQ ID NO: 45, and the variable light chain comprises a polypeptide consensus sequence having at least 95% sequence identity to the amino acid sequence of SEQ ID NO: 316. In some embodiments, the antibody or antigen binding fragment thereof binds a human HABP4, mouse HABP4, rat HABP4, bovine HABP4, or cynomolgus monkey HABP4. In some embodiments, the human HABP4 comprises a sequence of SEQ ID NO: 4352.

[0110] Provided herein is an antibody that competes with an antibody or antigen binding fragment of any one of claims 292-295 for binding to HABP4, wherein the antibody binds to human HABP4 or mouse HABP4.

[0111] Provided herein is an antibody or an antigen binding fragment thereof that selectively binds to endosome associated trafficking regulator 1, transcript variant 2 (SDCCAG3) or a variant thereof, comprising at least one of: a variable heavy chain region, wherein the variable heavy chain region comprises a complementarity-determining region heavy chain 1 (CDR-H1) of SEQ ID NO: 589, CDR-H2 of SEQ ID NO: 1131, and CDR-H3 of SEQ ID NO: 1673; and/or a variable light chain region, wherein the variable light chain region comprises a complementarity-determining region light chain 1 (CDR-L1) of SEQ ID NO: 860, CDR-L2 of SEQ ID NO: 1402, and CDR-L3 of SEQ ID NO: 1944. In some embodiments, the variable heavy chain comprises a polypeptide consensus sequence having at least 95% sequence identity to the amino acid sequence of SEQ ID NO: 47, and the variable light chain comprises a polypeptide consensus sequence having at least 95% sequence identity to the amino acid sequence of SEQ ID NO: 318. In some embodiments, the antibody or antigen binding fragment thereof binds a human SDCCAG3, mouse SDCCAG3, rat SDCCAG3, bovine SDCCAG3, or cynomolgus monkey SDCCAG3. In some embodiments, the human SDCCAG3 comprises a sequence of SEQ ID NO: 4373.

[0112] Provided herein is an antibody that competes with an antibody or antigen binding fragment of any one of claims 297-300 for binding to SDCCAG3, wherein the antibody binds to human SDCCAG3 or mouse SDCCAG3.

[0113] Provided herein is an antibody or an antigen binding fragment thereof that selectively binds to charged multivesicular body protein 4B (CHMP4B) or a variant thereof, comprising at least one of: a variable heavy chain region, wherein the variable heavy chain region comprises a complementarity-determining region heavy chain 1 (CDR-H1) of SEQ ID NO: 589, CDR-H2 of SEQ ID NO: 1131, and CDR-H3 of SEQ ID NO: 1673; and/or a variable light chain region, wherein the variable light chain region comprises a complementarity-determining region light chain 1 (CDR-L1) of SEQ ID NO: 860, CDR-L2 of SEQ ID NO: 1402, and CDR-L3 of SEQ ID NO: 1944. In some embodiments, the variable heavy chain comprises a polypeptide consensus sequence having at least 95% sequence identity to the amino acid sequence of SEQ ID NO: 47, and the variable light chain comprises a polypeptide consensus sequence having at least 95% sequence identity to the amino acid sequence of SEQ ID NO: 318. In some embodiments, the antibody or antigen binding fragment thereof binds a human CHMP4B, mouse CHMP4B, rat CHMP4B, bovine CHMP4B, or cynomolgus monkey CHMP4B. In some embodiments, the human CHMP4B comprises a sequence of SEQ ID NO: 4374.

[0114] Provided herein is an antibody that competes with an antibody or antigen binding fragment of any one of claims 302-305 for binding to CHMP4B, wherein the antibody binds to human CHMP4B or mouse CHMP4B.

[0115] Provided herein is an antibody or an antigen binding fragment thereof that selectively binds to glycogenin 2, transcript variant 2 (GYG2) or a variant thereof, comprising at least one of: a variable heavy chain region, wherein the variable heavy chain region comprises a complementarity-determining region heavy chain 1 (CDR-H1) of SEQ ID NO: 590, CDR-H2 of SEQ ID NO: 1132, and CDR-H3 of SEQ ID NO: 1674; and/or a variable light chain region, wherein the variable light chain region comprises a complementarity-determining region light chain 1 (CDR-L1) of SEQ ID NO: 861, CDR-L2 of SEQ ID NO: 1403, and CDR-L3 of SEQ ID NO: 1945. In some embodiments, the variable heavy chain comprises a polypeptide consensus sequence having at least 95% sequence identity to the amino acid sequence of SEQ ID NO: 48, and the variable light chain comprises a polypeptide consensus sequence having at least 95% sequence identity to the amino acid sequence of SEQ ID NO: 319. In some embodiments, the antibody or antigen binding fragment thereof binds a human GYG2, mouse GYG2, rat GYG2, bovine GYG2, or cynomolgus monkey GYG2. In some embodiments, the human GYG2 comprises a sequence of SEQ ID NO: 4375.

[0116] Provided herein is an antibody that competes with an antibody or antigen binding fragment of any one of claims 307-310 for binding to GYG2, wherein the antibody binds to human GYG2 or mouse GYG2.

[0117] Provided herein is an antibody or an antigen binding fragment thereof that selectively binds to Egf like and emi domain containing 1, pseudogene (EGFEM1P) or a variant thereof, comprising at least one of: a variable heavy chain region, wherein the variable heavy chain region comprises a complementarity-determining region heavy chain 1 (CDR-H1) of SEQ ID NO: 591, CDR-H2 of SEQ ID NO: 1133, and CDR-H3 of SEQ ID NO: 1675; and/or a variable light chain region, wherein the variable light chain region comprises a complementarity-determining region light chain 1 (CDR-L1) of SEQ ID NO: 862, CDR-L2 of SEQ ID NO: 1404, and CDR-L3 of SEQ ID NO: 1946. In some embodiments, the variable heavy chain comprises a polypeptide consensus sequence having at least 95% sequence identity to the amino acid sequence of SEQ ID NO: 49, and the variable light chain comprises a polypeptide consensus sequence having at least 95% sequence identity to the amino acid sequence of SEQ ID NO: 320. In some embodiments, the antibody or antigen binding fragment thereof binds a human EGFEM1P, mouse EGFEM1P, rat EGFEM1P, bovine EGFEM1P, or cynomolgus monkey EGFEM1P. In some embodiments, the human EGFEM1P comprises a sequence of SEQ ID NO: 4376.

[0118] Provided herein is an antibody that competes with an antibody or antigen binding fragment of any one of claims 312-315 for binding to EGFEM1P, wherein the antibody binds to human EGFEM1P or mouse EGFEM1P.

[0119] Provided herein is an antibody or an antigen binding fragment thereof that selectively binds to actinin alpha 4, transcript variant 1 (ACTN4) or a variant thereof, comprising at least one of: a variable heavy chain region, wherein the variable heavy chain region comprises a complementarity-determining region heavy chain 1 (CDR-H1) of SEQ ID NO: 593, CDR-H2 of SEQ ID NO: 1135, and CDR-H3 of SEQ ID NO: 1677; and/or a variable light chain region, wherein the variable light chain region comprises a complementarity-determining region light chain 1 (CDR-L1) of SEQ ID NO: 864, CDR-L2 of SEQ ID NO: 1406, and CDR-L3 of SEQ ID NO: 1948. In some embodiments, the variable heavy chain comprises a polypeptide consensus sequence having at least 95% sequence identity to the amino acid sequence of SEQ ID NO: 51, and the variable light chain comprises a polypeptide consensus sequence having at least 95% sequence identity to the amino acid sequence of SEQ ID NO: 322. In some embodiments, the antibody or antigen binding fragment thereof binds a human ACTN4, mouse ACTN4, rat ACTN4, bovine ACTN4, or cynomolgus monkey ACTN4. In some embodiments, the human ACTN4 comprises a sequence of SEQ ID NO: 4377.

[0120] Provided herein is an antibody that competes with an antibody or antigen binding fragment of any one of claims 317-320 for binding to ACTN4, wherein the antibody binds to human ACTN4 or mouse ACTN4.

[0121] Provided herein is an antibody or an antigen binding fragment thereof that selectively binds to PNMA family member 5, transcript variant 2 (PNMA5) or a variant thereof, comprising at least one of: a variable heavy chain region, wherein the variable heavy chain region comprises a complementarity-determining region heavy chain 1 (CDR-H1) of SEQ ID NO: 594, CDR-H2 of SEQ ID NO: 1136, and CDR-H3 of SEQ ID NO: 1678; and/or a variable light chain region, wherein the variable light chain region comprises a complementarity-determining region light chain 1 (CDR-L1) of SEQ ID NO: 865, CDR-L2 of SEQ ID NO: 1407, and CDR-L3 of SEQ ID NO: 1949. In some embodiments, the variable heavy chain comprises a polypeptide consensus sequence having at least 95% sequence identity to the amino acid sequence of SEQ ID NO: 52, and the variable light chain comprises a polypeptide consensus sequence having at least 95% sequence identity to the amino acid sequence of SEQ ID NO: 323. In some embodiments, the antibody or antigen binding fragment thereof binds a human PNMA5, mouse PNMA5, rat PNMA5, bovine PNMA5, or cynomolgus monkey PNMA5. In some embodiments, the human PNMA5 comprises a sequence of SEQ ID NO: 4357.

[0122] Provided herein is an antibody that competes with an antibody or antigen binding fragment of any one of claims 322-325 for binding to PNMA5, wherein the antibody binds to human PNMA5 or mouse PNMA5.

[0123] Provided herein is an antibody or an antigen binding fragment thereof that selectively binds to phospholipase C delta 1, transcript variant 2 (PLCD1) or a variant thereof, comprising at least one of: a variable heavy chain region, wherein the variable heavy chain region comprises a complementarity-determining region heavy chain 1 (CDR-H1) of SEQ ID NO: 594, CDR-H2 of SEQ ID NO: 1136, and CDR-H3 of SEQ ID NO: 1678; and/or a variable light chain region, wherein the variable light chain region comprises a complementarity-determining region light chain 1 (CDR-L1) of SEQ ID NO: 865, CDR-L2 of SEQ ID NO: 1407, and CDR-L3 of SEQ ID NO: 1949. In some embodiments, the variable heavy chain comprises a polypeptide consensus sequence having at least 95% sequence identity to the amino acid sequence of SEQ ID NO: 52; and the variable light chain comprises a polypeptide consensus sequence having at least 95% sequence identity to the amino acid sequence of SEQ ID NO: 323. In some embodiments, the antibody or antigen binding fragment thereof binds a human PLCD1, mouse PLCD1, rat PLCD1, bovine PLCD1, or cynomolgus monkey PLCD1. In some embodiments, the human PLCD1 comprises a sequence of SEQ ID NO: 4378.

[0124] Provided herein is an antibody that competes with an antibody or antigen binding fragment of any one of claims 327-330 for binding to PLCD1, wherein the antibody binds to human PLCD1 or mouse PLCD1.

[0125] Provided herein is an antibody or an antigen binding fragment thereof that selectively binds to zinc finger protein 326, transcript variant 1 (ZNF326) or a variant thereof, comprising at least one of: a variable heavy chain region, wherein the variable heavy chain region comprises a complementarity-determining region heavy chain 1 (CDR-H1) of SEQ ID NO: 594, CDR-H2 of SEQ ID NO: 1136, and CDR-H3 of SEQ ID NO: 1678; and/or a variable light chain region, wherein the variable light chain region comprises a complementarity-determining region light chain 1 (CDR-L1) of SEQ ID NO: 865, CDR-L2 of SEQ ID NO: 1407, and CDR-L3 of SEQ ID NO: 1949. In some embodiments, the variable heavy chain comprises a polypeptide consensus sequence having at least 95% sequence identity to the amino acid sequence of SEQ ID NO: 52, and the variable light chain comprises a polypeptide consensus sequence having at least 95% sequence identity to the amino acid sequence of SEQ ID NO: 323. In some embodiments, the antibody or antigen binding fragment thereof binds a human ZNF326, mouse ZNF326, rat ZNF326, bovine ZNF326, or cynomolgus monkey ZNF326. In some embodiments, the human ZNF326 comprises a sequence of SEQ ID NO: 4379.

[0126] Provided herein is an antibody that competes with an antibody or antigen binding fragment of any one of claims 332-335 for binding to ZNF326, wherein the antibody binds to human ZNF326 or mouse ZNF326.

[0127] Provided herein is an antibody or an antigen binding fragment thereof that selectively binds to—(LN608403.1_frag) or a variant thereof, comprising at least one of: a variable heavy chain region, wherein the variable heavy chain region comprises a complementarity-determining region heavy chain 1 (CDR-H1) of SEQ ID NO: 600, CDR-H2 of SEQ ID NO: 1142, and CDR-H3 of SEQ ID NO: 1684; and/or a variable light chain region, wherein the variable light chain region comprises a complementarity-determining region light chain 1 (CDR-L1) of SEQ ID NO: 871, CDR-L2 of SEQ ID NO: 1413, and CDR-L3 of SEQ ID NO: 1955. In some embodiments, the variable heavy chain comprises a polypeptide consensus sequence having at least 95% sequence identity to the amino acid sequence of SEQ ID NO: 58, and the variable light chain comprises a polypeptide consensus sequence having at least 95% sequence identity to the amino acid sequence of SEQ ID NO: 329. In some embodiments, the antibody or antigen binding fragment thereof binds a human LN608403.1_frag, mouse LN608403.1_frag, rat LN608403.1_frag, bovine LN608403.1_frag, or cynomolgus monkey LN608403.1_frag. In some embodiments, the human LN608403.1_frag comprises a sequence of SEQ ID NO: 4380.

[0128] Provided herein is an antibody that competes with an antibody or antigen binding fragment of any one of claims 337-340 for binding to LN608403.1 frag, wherein the antibody binds to human LN608403.1_frag or mouse LN608403.1_frag.

[0129] Provided herein is an antibody or an antigen binding fragment thereof that selectively binds to JPX transcript, XIST activator (JPX_frag) or a variant thereof, comprising at least one of: a variable heavy chain region, wherein the variable heavy chain region comprises a complementarity-determining region heavy chain 1 (CDR-H1) of SEQ ID NO: 600, CDR-H2 of SEQ ID NO: 1142, and CDR-H3 of SEQ ID NO: 1684; and/or a variable light chain region, wherein the variable light chain region comprises a complementarity-determining region light chain 1 (CDR-L1) of SEQ ID NO: 871, CDR-L2 of SEQ ID NO: 1413, and CDR-L3 of SEQ ID NO: 1955. In some embodiments, the variable heavy chain comprises a polypeptide consensus sequence having at least 95% sequence identity to the amino acid sequence of SEQ ID NO: 58, and the variable light chain comprises a polypeptide consensus sequence having at least 95% sequence identity to the amino acid sequence of SEQ ID NO: 329. In some embodiments, the antibody or antigen binding fragment thereof binds a human JPX_frag, mouse JPX_frag, rat JPX_frag, bovine JPX_frag, or cynomolgus monkey JPX_frag. In some embodiments, the human JPX_frag comprises a sequence of SEQ ID NO: 4381.

[0130] Provided herein is an antibody that competes with an antibody or antigen binding fragment of any one of claims 342-345 for binding to JPX_frag, wherein the antibody binds to human JPX_frag or mouse JPX_frag.

[0131] Provided herein is an antibody or an antigen binding fragment thereof that selectively binds to odorant binding protein 2A, transcript variant alpha (OBP2A) or a variant thereof, comprising at least one of: a variable heavy chain region, wherein the variable heavy chain region comprises a complementarity-determining region heavy chain 1 (CDR-H1) of SEQ ID NO: 600, CDR-H2 of SEQ ID NO: 1142, and CDR-H3 of SEQ ID NO: 1684; and/or a variable light chain region, wherein the variable light chain region comprises a complementarity-determining region light chain 1 (CDR-L1) of SEQ ID NO: 871, CDR-L2 of SEQ ID NO: 1413, and CDR-L3 of SEQ ID NO: 1955. In some embodiments, the variable heavy chain comprises a polypeptide consensus sequence having at least 95% sequence identity to the amino acid sequence of SEQ ID NO: 58, and the variable light chain comprises a polypeptide consensus sequence having at least 95% sequence identity to the amino acid sequence of SEQ ID NO: 329. In some embodiments, the antibody or antigen binding fragment thereof binds a human OBP2A, mouse OBP2A, rat OBP2A, bovine OBP2A, or cynomolgus monkey OBP2A. In some embodiments, the human OBP2A comprises a sequence of SEQ ID NO: 4382.

[0132] Provided herein is an antibody that competes with an antibody or antigen binding fragment of any one of claims 347-350 for binding to OBP2A, wherein the antibody binds to human OBP2A or mouse OBP2A.

[0133] Provided herein is an antibody or an antigen binding fragment thereof that selectively binds to myelin transcription factor 1 like, transcript variant 2 (MYT1L) or a variant thereof, comprising at least one of: a variable heavy chain region, wherein the variable heavy chain region comprises a complementarity-determining region heavy chain 1 (CDR-H1) of SEQ ID NO: 604, CDR-H2 of SEQ ID NO: 1146, and CDR-H3 of SEQ ID NO: 1688; and/or a variable light chain region, wherein the variable light chain region comprises a complementarity-determining region light chain 1 (CDR-L1) of SEQ ID NO: 875, CDR-L2 of SEQ ID NO: 1417, and CDR-L3 of SEQ ID NO: 1959. In some embodiments, the variable heavy chain comprises a polypeptide consensus sequence having at least 95% sequence identity to the amino acid sequence of SEQ ID NO: 62, and the variable light chain comprises a polypeptide consensus sequence having at least 95% sequence identity to the amino acid sequence of SEQ ID NO: 333. In some embodiments, the antibody or antigen binding fragment thereof binds a human MYT1L, mouse MYT1L, rat MYT1L, bovine MYT1L, or cynomolgus monkey MYT1L. In some embodiments, the human MYT1L comprises a sequence of SEQ ID NO: 4383.

[0134] Provided herein is an antibody that competes with an antibody or antigen binding fragment of any one of claims 352-355 for binding to MYT1L, wherein the antibody binds to human MYT1L or mouse MYT1L.

[0135] Provided herein is an antibody or an antigen binding fragment thereof that selectively binds to heat shock protein family E (Hsp10) member 1 (HSPE1) or a variant thereof, comprising at least one of: a variable heavy chain region, wherein the variable heavy chain region comprises a complementarity-determining region heavy chain 1 (CDR-H1) of SEQ ID NO: 604, CDR-H2 of SEQ ID NO: 1146, and CDR-H3 of SEQ ID NO: 1688; and/or a variable light chain region, wherein the variable light chain region comprises a complementarity-determining region light chain 1 (CDR-L1) of SEQ ID NO: 875, CDR-L2 of SEQ ID NO: 1417, and CDR-L3 of SEQ ID NO: 1959. In some embodiments, the variable heavy chain comprises a polypeptide consensus sequence having at least 95% sequence identity to the amino acid sequence of SEQ ID NO: 62, and the variable light chain comprises a polypeptide consensus sequence having at least 95% sequence identity to the amino acid sequence of SEQ ID NO: 333. In some embodiments, the antibody or antigen binding fragment thereof binds a human HSPE1, mouse HSPE1, rat HSPE1, bovine HSPE1, or cynomolgus monkey HSPE1. In some embodiments, the human HSPE1 comprises a sequence of SEQ ID NO: 4384.

[0136] Provided herein is an antibody that competes with an antibody or antigen binding fragment of any one of claims 357-360 for binding to HSPE1, wherein the antibody binds to human HSPE1 or mouse HSPE1.

[0137] Provided herein is an antibody or an antigen binding fragment thereof that selectively binds to kelch like ECH associated protein 1, transcript variant 1 (KEAP1) or a variant thereof, comprising at least one of: a variable heavy chain region, wherein the variable heavy chain region comprises a complementarity-determining region heavy chain 1 (CDR-H1) of SEQ ID NO: 607, CDR-H2 of SEQ ID NO: 1149, and CDR-H3 of SEQ ID NO: 1691; and/or a variable light chain region, wherein the variable light chain region comprises a complementarity-determining region light chain 1 (CDR-L1) of SEQ ID NO: 878, CDR-L2 of SEQ ID NO: 1420, and CDR-L3 of SEQ ID NO: 1962. In some embodiments, the variable heavy chain comprises a polypeptide consensus sequence having at least 95% sequence identity to the amino acid sequence of SEQ ID NO: 65, and the variable light chain comprises a polypeptide consensus sequence having at least 95% sequence identity to the amino acid sequence of SEQ ID NO: 336. In some embodiments, the antibody or antigen binding fragment thereof binds a human KEAP1, mouse KEAP1, rat KEAP1, bovine KEAP1, or cynomolgus monkey KEAP1. In some embodiments, the human KEAP1 comprises a sequence of SEQ ID NO: 4385.

[0138] Provided herein is an antibody that competes with an antibody or antigen binding fragment of any one of claims 362-365 for binding to KEAP1, wherein the antibody binds to human KEAP1 or mouse KEAP1.

[0139] Provided herein is an antibody or an antigen binding fragment thereof that selectively binds to nucleosome assembly protein 1 like 1, transcript variant 1 (NAP1L1) or a variant thereof, comprising at least one of: a variable heavy chain region, wherein the variable heavy chain region comprises a complementarity-determining region heavy chain 1 (CDR-H1) of SEQ ID NO: 614, CDR-H2 of SEQ ID NO: 1156, and CDR-H3 of SEQ ID NO: 1698; and/or a variable light chain region, wherein the variable light chain region comprises a complementarity-determining region light chain 1 (CDR-L1) of SEQ ID NO: 885, CDR-L2 of SEQ ID NO: 1427, and CDR-L3 of SEQ ID NO: 1969. In some embodiments, the variable heavy chain comprises a polypeptide consensus sequence having at least 95% sequence identity to the amino acid sequence of SEQ ID NO: 72, and the variable light chain comprises a polypeptide consensus sequence having at least 95% sequence identity to the amino acid sequence of SEQ ID NO: 343. In some embodiments, the antibody or antigen binding fragment thereof binds a human NAP1L1, mouse NAP1L1, rat NAP1L1, bovine NAP1L1, or cynomolgus monkey NAP1L1. In some embodiments, the human NAP1L1 comprises a sequence of SEQ ID NO: 4386.

[0140] Provided herein is an antibody that competes with an antibody or antigen binding fragment of any one of claims 367-370 for binding to NAP1L1, wherein the antibody binds to human NAP1L1 or mouse NAP1L1.

[0141] Provided herein is an antibody or an antigen binding fragment thereof that selectively binds to nudE neurodevelopment protein 1, transcript variant 1 (NDE1) or a variant thereof, comprising at least one of: a variable heavy chain region, wherein the variable heavy chain region comprises a complementarity-determining region heavy chain 1 (CDR-H1) of SEQ ID NO: 615, CDR-H2 of SEQ ID NO: 1157, and CDR-H3 of SEQ ID NO: 1699; and/or a variable light chain region, wherein the variable light chain region comprises a complementarity-determining region light chain 1 (CDR-L1) of SEQ ID NO: 886, CDR-L2 of SEQ ID NO: 1428, and CDR-L3 of SEQ ID NO: 1970. In some embodiments, the variable heavy chain comprises a polypeptide consensus sequence having at least 95% sequence identity to the amino acid sequence of SEQ ID NO: 73, and the variable light chain comprises a polypeptide consensus sequence having at least 95% sequence identity to the amino acid sequence of SEQ ID NO: 344. In some embodiments, the antibody or antigen binding fragment thereof binds a human NDE1, mouse NDE1, rat NDE1, bovine NDE1, or cynomolgus monkey NDE1. In some embodiments, the human NDE1 comprises a sequence of SEQ ID NO: 4387.

[0142] Provided herein is an antibody that competes with an antibody or antigen binding fragment of any one of claims 372-375 for binding to NDE1, wherein the antibody binds to human NDE1 or mouse NDE.

[0143] Provided herein is an antibody or an antigen binding fragment thereof that selectively binds to TruB pseudouridine synthase family member 1 (TRUB1) or a variant thereof, comprising at least one of: a variable heavy chain region, wherein the variable heavy chain region comprises a complementarity-determining region heavy chain 1 (CDR-H1) of SEQ ID NO: 616, CDR-H2 of SEQ ID NO: 1158, and CDR-H3 of SEQ ID NO: 1700; and/or a variable light chain region, wherein the variable light chain region comprises a complementarity-determining region light chain 1 (CDR-L1) of SEQ ID NO: 887, CDR-L2 of SEQ ID NO: 1429, and CDR-L3 of SEQ ID NO: 1971. In some embodiments, the variable heavy chain comprises a polypeptide consensus sequence having at least 95% sequence identity to the amino acid sequence of SEQ ID NO: 74, and the variable light chain comprises a polypeptide consensus sequence having at least 95% sequence identity to the amino acid sequence of SEQ ID NO: 345. In some embodiments, the antibody or antigen binding fragment thereof binds a human TRUB1, mouse TRUB1, rat TRUB1, bovine TRUB1, or cynomolgus monkey TRUB1. In some embodiments, the human TRUB1 comprises a sequence of SEQ ID NO: 4388.

[0144] Provided herein is an antibody that competes with an antibody or antigen binding fragment of any one of claims 377-380 for binding to TRUB1, wherein the antibody binds to human TRUB1 or mouse TRUB1.

[0145] Provided herein is an antibody or an antigen binding fragment thereof that selectively binds to inosine monophosphate dehydrogenase 2 (IMPDH2) or a variant thereof, comprising at least one of: a variable heavy chain region, wherein the variable heavy chain region comprises a complementarity-determining region heavy chain 1 (CDR-H1) of SEQ ID NO: 616, CDR-H2 of SEQ ID NO: 1158, and CDR-H3 of SEQ ID NO: 1700; and/or a variable light chain region, wherein the variable light chain region comprises a complementarity-determining region light chain 1 (CDR-L1) of SEQ ID NO: 887, CDR-L2 of SEQ ID NO: 1429, and CDR-L3 of SEQ ID NO: 1971. In some embodiments, the variable heavy chain comprises a polypeptide consensus sequence having at least 95% sequence identity to the amino acid sequence of SEQ ID NO: 74; and the variable light chain comprises a polypeptide consensus sequence having at least 95% sequence identity to the amino acid sequence of SEQ ID NO: 345. In some embodiments, the antibody or antigen binding fragment thereof binds a human IMPDH2, mouse IMPDH2, rat IMPDH2, bovine IMPDH2, or cynomolgus monkey IMPDH2. In some embodiments, the human IMPDH2 comprises a sequence of SEQ ID NO: 4389.

[0146] Provided herein is an antibody that competes with an antibody or antigen binding fragment of any one of claims 382-385 for binding to IMPDH2, wherein the antibody binds to human IMPDH2 or mouse IMPDH2.

[0147] Provided herein is an antibody or an antigen binding fragment thereof that selectively binds to phospholipid scramblase 4, transcript variant X4 (PLSCR4) or a variant thereof, comprising at least one of: a variable heavy chain region, wherein the variable heavy chain region comprises a complementarity-determining region heavy chain 1 (CDR-H1) of SEQ ID NO: 616, CDR-H2 of SEQ ID NO: 1158, and CDR-H3 of SEQ ID NO: 1700; and/or a variable light chain region, wherein the variable light chain region comprises a complementarity-determining region light chain 1 (CDR-L1) of SEQ ID NO: 887, CDR-L2 of SEQ ID NO: 1429, and CDR-L3 of SEQ ID NO: 1971. In some embodiments, the variable heavy chain comprises a polypeptide consensus sequence having at least 95% sequence identity to the amino acid sequence of SEQ ID NO: 74, and the variable light chain comprises a polypeptide consensus sequence having at least 95% sequence identity to the amino acid sequence of SEQ ID NO: 345. In some embodiments, the antibody or antigen binding fragment thereof binds a human PLSCR4, mouse PLSCR4, rat PLSCR4, bovine PLSCR4, or cynomolgus monkey PLSCR4. In some embodiments, the human PLSCR4 comprises a sequence of SEQ ID NO: 4390.

[0148] Provided herein is an antibody that competes with an antibody or antigen binding fragment of any one of claims 387-390 for binding to PLSCR4, wherein the antibody binds to human PLSCR4 or mouse PLSCR4.

[0149] Provided herein is an antibody or an antigen binding fragment thereof that selectively binds to influenza virus NS1A binding protein (IVNS1ABP) or a variant thereof, comprising at least one of: a variable heavy chain region, wherein the variable heavy chain region comprises a complementarity-determining region heavy chain 1 (CDR-H1) of SEQ ID NO: 617, CDR-H2 of SEQ ID NO: 1159, and CDR-H3 of SEQ ID NO: 1701; and/or

[0150] a variable light chain region, wherein the variable light chain region comprises a complementarity-determining region light chain 1 (CDR-L1) of SEQ ID NO: 888, CDR-L2 of SEQ ID NO: 1430, and CDR-L3 of SEQ ID NO: 1972. In some embodiments, the variable heavy chain comprises a polypeptide consensus sequence having at least 95% sequence identity to the amino acid sequence of SEQ ID NO: 75, and the variable light chain comprises a polypeptide consensus sequence having at least 95% sequence identity to the amino acid sequence of SEQ ID NO: 346. In some embodiments, the antibody or antigen binding fragment thereof binds a human IVNS1ABP, mouse IVNS1ABP, rat IVNS1ABP, bovine IVNS1ABP, or cynomolgus monkey IVNS1ABP. In some embodiments, the human IVNS1ABP comprises a sequence of SEQ ID NO: 4391.

[0151] Provided herein is an antibody that competes with an antibody or antigen binding fragment of any one of claims 392-395 for binding to IVNS1ABP, wherein the antibody binds to human IVNS1ABP or mouse IVNS1ABP.

[0152] Provided herein is an antibody or an antigen binding fragment thereof that selectively binds to disheveled segment polarity protein 3 (DVL3) or a variant thereof, comprising at least one of: a variable heavy chain region, wherein the variable heavy chain region comprises a complementarity-determining region heavy chain 1 (CDR-H1) of SEQ ID NO: 618, CDR-H2 of SEQ ID NO: 1160, and CDR-H3 of SEQ ID NO: 1702; and/or a variable light chain region, wherein the variable light chain region comprises a complementarity-determining region light chain 1 (CDR-L1) of SEQ ID NO: 889, CDR-L2 of SEQ ID NO: 1431, and CDR-L3 of SEQ ID NO: 1973. In some embodiments, the variable heavy chain comprises a polypeptide consensus sequence having at least 95% sequence identity to the amino acid sequence of SEQ ID NO: 76, and the variable light chain comprises a polypeptide consensus sequence having at least 95% sequence identity to the amino acid sequence of SEQ ID NO: 347. In some embodiments, the antibody or antigen binding fragment thereof binds a human DVL3, mouse DVL3, rat DVL3, bovine DVL3, or cynomolgus monkey DVL3. In some embodiments, the human DVL3 comprises a sequence of SEQ ID NO: 4392.

[0153] Provided herein is an antibody that competes with an antibody or antigen binding fragment of any one of claims 397-400 for binding to DVL3, wherein the antibody binds to human DVL3 or mouse DVL3.

[0154] Provided herein is an antibody or an antigen binding fragment thereof that selectively binds to Zinc finger protein 260 (ZNF260) or a variant thereof, comprising at least one of: a variable heavy chain region, wherein the variable heavy chain region comprises a complementarity-determining region heavy chain 1 (CDR-H1) of SEQ ID NO: 618, CDR-H2 of SEQ ID NO: 1160, and CDR-H3 of SEQ ID NO: 1702; and/or a variable light chain region, wherein the variable light chain region comprises a complementarity-determining region light chain 1 (CDR-L1) of SEQ ID NO: 889, CDR-L2 of SEQ ID NO: 1431, and CDR-L3 of SEQ ID NO: 1973. In some embodiments, the variable heavy chain comprises a polypeptide consensus sequence having at least 95% sequence identity to the amino acid sequence of SEQ ID NO: 76, and the variable light chain comprises a polypeptide consensus sequence having at least 95% sequence identity to the amino acid sequence of SEQ ID NO: 347. In some embodiments, the antibody or antigen binding fragment thereof binds a human ZNF260, mouse ZNF260, rat ZNF260, bovine ZNF260, or cynomolgus monkey ZNF260. In some embodiments, the human ZNF260 comprises a sequence of SEQ ID NO: 4393.

[0155] Provided herein is an antibody that competes with an antibody or antigen binding fragment of any one of claims 402-405 for binding to ZNF260, wherein the antibody binds to human ZNF260 or mouse ZNF260.

[0156] Provided herein is an antibody or an antigen binding fragment thereof that selectively binds to sorting nexin 33, transcript variant 1 (SNX33) or a variant thereof, comprising at least one of: a variable heavy chain region, wherein the variable heavy chain region comprises a complementarity-determining region heavy chain 1 (CDR-H1) of SEQ ID NO: 619, CDR-H2 of SEQ ID NO: 1161, and CDR-H3 of SEQ ID NO: 1703; and/or a variable light chain region, wherein the variable light chain region comprises a complementarity-determining region light chain 1 (CDR-L1) of SEQ ID NO: 890, CDR-L2 of SEQ ID NO: 1432, and CDR-L3 of SEQ ID NO: 1974. In some embodiments, the variable heavy chain comprises a polypeptide consensus sequence having at least 95% sequence identity to the amino acid sequence of SEQ ID NO: 77, and the variable light chain comprises a polypeptide consensus sequence having at least 95% sequence identity to the amino acid sequence of SEQ ID NO: 348. In some embodiments, the antibody or antigen binding fragment thereof binds a human SNX33, mouse SNX33, rat SNX33, bovine SNX33, or cynomolgus monkey SNX33. In some embodiments, the human SNX33 comprises a sequence of SEQ ID NO: 4394.

[0157] Provided herein is an antibody that competes with an antibody or antigen binding fragment of any one of claims 407-410 for binding to SNX33, wherein the antibody binds to human SNX33 or mouse SNX33.

[0158] Provided herein is an antibody or an antigen binding fragment thereof that selectively binds to Jupiter microtubule associated homolog 2 (HN1L) or a variant thereof, comprising at least one of: a variable heavy chain region, wherein the variable heavy chain region comprises a complementarity-determining region heavy chain 1 (CDR-H1) of SEQ ID NO: 620, CDR-H2 of SEQ ID NO: 1162, and CDR-H3 of SEQ ID NO: 1704; and/or a variable light chain region, wherein the variable light chain region comprises a complementarity-determining region light chain 1 (CDR-L1) of SEQ ID NO: 891, CDR-L2 of SEQ ID NO: 1433, and CDR-L3 of SEQ ID NO: 1975. In some embodiments, the variable heavy chain comprises a polypeptide consensus sequence having at least 95% sequence identity to the amino acid sequence of SEQ ID NO: 78, and the variable light chain comprises a polypeptide consensus sequence having at least 95% sequence identity to the amino acid sequence of SEQ ID NO: 349. In some embodiments, the antibody or antigen binding fragment thereof binds a human HN1L, mouse HN1L, rat HN1L, bovine HN1L, or cynomolgus monkey HN1L. In some embodiments, the human HN1L comprises a sequence of SEQ ID NO: 4395.

[0159] Provided herein is an antibody that competes with an antibody or antigen binding fragment of any one of claims 412-415 for binding to HN1L, wherein the antibody binds to human HN1L or mouse HN1L.

[0160] Provided herein is an antibody or an antigen binding fragment thereof that selectively binds to thioesterase superfamily member 6, transcript variant 1 (THEM6) or a variant thereof, comprising at least one of:

[0161] a variable heavy chain region, wherein the variable heavy chain region comprises a complementarity-determining region heavy chain 1 (CDR-H1) of SEQ ID NO: 620, CDR-H2 of SEQ ID NO: 1162, and CDR-H3 of SEQ ID NO: 1704; and/or a variable light chain region, wherein the variable light chain region comprises a complementarity-determining region light chain 1 (CDR-L1) of SEQ ID NO: 891, CDR-L2 of SEQ ID NO: 1433, and CDR-L3 of SEQ ID NO: 1975. In some embodiments, the variable heavy chain comprises a polypeptide consensus sequence having at least 95% sequence identity to the amino acid sequence of SEQ ID NO: 78, and the variable light chain comprises a polypeptide consensus sequence having at least 95% sequence identity to the amino acid sequence of SEQ ID NO: 349. In some embodiments, the antibody or antigen binding fragment thereof binds a human THEM6, mouse THEM6, rat THEM6, bovine THEM6, or cynomolgus monkey THEM6. In some embodiments, the human THEM6 comprises a sequence of SEQ ID NO: 4396.

[0162] Provided herein is an antibody that competes with an antibody or antigen binding fragment of any one of claims 417-420 for binding to THEM6, wherein the antibody binds to human THEM6 or mouse THEM6.

[0163] Provided herein is an antibody or an antigen binding fragment thereof that selectively binds to KH RNA binding domain containing, signal transduction associated 2, transcript variant 2 (KHDRBS2) or a variant thereof, comprising at least one of: a variable heavy chain region, wherein the variable heavy chain region comprises a complementarity-determining region heavy chain 1 (CDR-H1) of SEQ ID NO: 621, CDR-H2 of SEQ ID NO: 1163, and CDR-H3 of SEQ ID NO: 1705; and/or a variable light chain region, wherein the variable light chain region comprises a complementarity-determining region light chain 1 (CDR-L1) of SEQ ID NO: 892, CDR-L2 of SEQ ID NO: 1434, and CDR-L3 of SEQ ID NO: 1976. In some embodiments, the variable heavy chain comprises a polypeptide consensus sequence having at least 95% sequence identity to the amino acid sequence of SEQ ID NO: 79, and the variable light chain comprises a polypeptide consensus sequence having at least 95% sequence identity to the amino acid sequence of SEQ ID NO: 350. In some embodiments, the antibody or antigen binding fragment thereof binds a human KHDRBS2, mouse KHDRBS2, rat KHDRBS2, bovine KHDRBS2, or cynomolgus monkey KHDRBS2. In some embodiments, the human KHDRBS2 comprises a sequence of SEQ ID NO: 4397.

[0164] Provided herein is an antibody that competes with an antibody or antigen binding fragment of any one of claims 422-425 for binding to KHDRBS2, wherein the antibody binds to human KHDRBS2 or mouse KHDRBS2.

[0165] Provided herein is an antibody or an antigen binding fragment thereof that selectively binds to complement C1q like 3 (C1QL3) or a variant thereof, comprising at least one of: a variable heavy chain region, wherein the variable heavy chain region comprises a complementarity-determining region heavy chain 1 (CDR-H1) of SEQ ID NO: 622, CDR-H2 of SEQ ID NO: 1164, and CDR-H3 of SEQ ID NO: 1706; and/or a variable light chain region, wherein the variable light chain region comprises a complementarity-determining region light chain 1 (CDR-L1) of SEQ ID NO: 893, CDR-L2 of SEQ ID NO: 1435, and CDR-L3 of SEQ ID NO: 1977. In some embodiments, the variable heavy chain comprises a polypeptide consensus sequence having at least 95% sequence identity to the amino acid sequence of SEQ ID NO: 80, and the variable light chain comprises a polypeptide consensus sequence having at least 95% sequence identity to the amino acid sequence of SEQ ID NO: 351. In some embodiments, the antibody or antigen binding fragment thereof binds a human C1QL3, mouse C1QL3, rat C1QL3, bovine C1QL3, or cynomolgus monkey C1QL3. In some embodiments, the human C1QL3 comprises a sequence of SEQ ID NO: 4398.

[0166] Provided herein is an antibody that competes with an antibody or antigen binding fragment of any one of claims 427-430 for binding to C1QL3, wherein the antibody binds to human C1QL3 or mouse C1QL3.

[0167] Provided herein is an antibody or an antigen binding fragment thereof that selectively binds to protein phosphatase 1 regulatory subunit 27 (PPP1R27) or a variant thereof, comprising at least one of: a variable heavy chain region, wherein the variable heavy chain region comprises a complementarity-determining region heavy chain 1 (CDR-H1) of SEQ ID NO: 623, CDR-H2 of SEQ ID NO: 1165, and CDR-H3 of SEQ ID NO: 1707; and/or a variable light chain region, wherein the variable light chain region comprises a complementarity-determining region light chain 1 (CDR-L1) of SEQ ID NO: 894, CDR-L2 of SEQ ID NO: 1436, and CDR-L3 of SEQ ID NO: 1978. In some embodiments, the variable heavy chain comprises a polypeptide consensus sequence having at least 95% sequence identity to the amino acid sequence of SEQ ID NO: 81, and the variable light chain comprises a polypeptide consensus sequence having at least 95% sequence identity to the amino acid sequence of SEQ ID NO: 352. In some embodiments, the antibody or antigen binding fragment thereof binds a human PPP1R27, mouse PPP1R27, rat PPP1R27, bovine PPP1R27, or cynomolgus monkey PPP1R27. In some embodiments, the human PPP1R27 comprises a sequence of SEQ ID NO: 4399.

[0168] Provided herein is an antibody that competes with an antibody or antigen binding fragment of any one of claims 432-435 for binding to PPP1R27, wherein the antibody binds to human PPP1R27 or mouse PPP1R27.

[0169] Provided herein is an antibody or an antigen binding fragment thereof that selectively binds to deoxyribonuclease 1 like 2, transcript variant 1 (DNASE1L2) or a variant thereof, comprising at least one of: a variable heavy chain region, wherein the variable heavy chain region comprises a complementarity-determining region heavy chain 1 (CDR-H1) of SEQ ID NO: 624, CDR-H2 of SEQ ID NO: 1166, and CDR-H3 of SEQ ID NO: 1708; and/or a variable light chain region, wherein the variable light chain region comprises a complementarity-determining region light chain 1 (CDR-L1) of SEQ ID NO: 895, CDR-L2 of SEQ ID NO: 1437, and CDR-L3 of SEQ ID NO: 1979. In some embodiments, the variable heavy chain comprises a polypeptide consensus sequence having at least 95% sequence identity to the amino acid sequence of SEQ ID NO: 82, and the variable light chain comprises a polypeptide consensus sequence having at least 95% sequence identity to the amino acid sequence of SEQ ID NO: 353. In some embodiments, the antibody or antigen binding fragment thereof binds a human DNASE1L2, mouse DNASE1L2, rat DNASE1L2, bovine DNASE1L2, or cynomolgus monkey DNASE1L2. In some embodiments, the human DNASE1L2 comprises a sequence of SEQ ID NO: 4400.

[0170] Provided herein is an antibody that competes with an antibody or antigen binding fragment of any one of claims 437-440 for binding to DNASE1L2, wherein the antibody binds to human DNASE1L2 or mouse DNASE1L2.

[0171] Provided herein is an antibody or an antigen binding fragment thereof that selectively binds to extended synaptotagmin 2 (ESYT2_frag) or a variant thereof, comprising at least one of: a variable heavy chain region, wherein the variable heavy chain region comprises a complementarity-determining region heavy chain 1 (CDR-H1) of SEQ ID NO: 625, CDR-H2 of SEQ ID NO: 1167, and CDR-H3 of SEQ ID NO: 1709; and/or a variable light chain region, wherein the variable light chain region comprises a complementarity-determining region light chain 1 (CDR-L1) of SEQ ID NO: 896, CDR-L2 of SEQ ID NO: 1438, and CDR-L3 of SEQ ID NO: 1980. In some embodiments, the variable heavy chain comprises a polypeptide consensus sequence having at least 95% sequence identity to the amino acid sequence of SEQ ID NO: 83, and the variable light chain comprises a polypeptide consensus sequence having at least 95% sequence identity to the amino acid sequence of SEQ ID NO: 354. In some embodiments, the antibody or antigen binding fragment thereof binds a human ESYT2_frag, mouse ESYT2_frag, rat ESYT2_frag, bovine ESYT2_frag, or cynomolgus monkey ESYT2_frag. In some embodiments, the human ESYT2_frag comprises a sequence of SEQ ID NO: 4401.

[0172] Provided herein is an antibody that competes with an antibody or antigen binding fragment of any one of claims 442-445 for binding to ESYT2_frag, wherein the antibody binds to human ESYT2_frag or mouse ESYT2_frag.

[0173] Provided herein is an antibody or an antigen binding fragment thereof that selectively binds to C—C motif chemokine ligand 18 (CCL18) or a variant thereof, comprising at least one of: a variable heavy chain region, wherein the variable heavy chain region comprises a complementarity-determining region heavy chain 1 (CDR-H1) of SEQ ID NO: 626, CDR-H2 of SEQ ID NO: 1168, and CDR-H3 of SEQ ID NO: 1710; and/or a variable light chain region, wherein the variable light chain region comprises a complementarity-determining region light chain 1 (CDR-L1) of SEQ ID NO: 897, CDR-L2 of SEQ ID NO: 1439, and CDR-L3 of SEQ ID NO: 1981. In some embodiments, the variable heavy chain comprises a polypeptide consensus sequence having at least 95% sequence identity to the amino acid sequence of SEQ ID NO: 84, and the variable light chain comprises a polypeptide consensus sequence having at least 95% sequence identity to the amino acid sequence of SEQ ID NO: 355. In some embodiments, the antibody or antigen binding fragment thereof binds a human CCL18, mouse CCL18, rat CCL18, bovine CCL18, or cynomolgus monkey CCL18. In some embodiments, the human CCL18 comprises a sequence of SEQ ID NO: 4402.

[0174] Provided herein is an antibody that competes with an antibody or antigen binding fragment of any one of claims 447-450 for binding to CCL18, wherein the antibody binds to human CCL18 or mouse CCL18.

[0175] Provided herein is an antibody or an antigen binding fragment thereof that selectively binds to homeobox and leucine zipper encoding (HOMEZ) or a variant thereof, comprising at least one of: a variable heavy chain region, wherein the variable heavy chain region comprises a complementarity-determining region heavy chain 1 (CDR-H1) of SEQ ID NO: 627, CDR-H2 of SEQ ID NO: 1169, and CDR-H3 of SEQ ID NO: 1711; and/or a variable light chain region, wherein the variable light chain region comprises a complementarity-determining region light chain 1 (CDR-L1) of SEQ ID NO: 898, CDR-L2 of SEQ ID NO: 1440, and CDR-L3 of SEQ ID NO: 1982. In some embodiments, the variable heavy chain comprises a polypeptide consensus sequence having at least 95% sequence identity to the amino acid sequence of SEQ ID NO: 85, and the variable light chain comprises a polypeptide consensus sequence having at least 95% sequence identity to the amino acid sequence of SEQ ID NO: 356. In some embodiments, the antibody or antigen binding fragment thereof binds a human HOMEZ, mouse HOMEZ, rat HOMEZ, bovine HOMEZ, or cynomolgus monkey HOMEZ. In some embodiments, the human HOMEZ comprises a sequence of SEQ ID NO: 4403.

[0176] Provided herein is an antibody that competes with an antibody or antigen binding fragment of any one of claims 452-455 for binding to HOMEZ, wherein the antibody binds to human HOMEZ or mouse HOMEZ.

[0177] Provided herein is an antibody or an antigen binding fragment thereof that selectively binds to BAR/IMD domain containing adaptor protein 2, transcript variant 3 (BAIAP2) or a variant thereof, comprising at least one of: a variable heavy chain region, wherein the variable heavy chain region comprises a complementarity-determining region heavy chain 1 (CDR-H1) of SEQ ID NO: 627, CDR-H2 of SEQ ID NO: 1169, and CDR-H3 of SEQ ID NO: 1711; and/or a variable light chain region, wherein the variable light chain region comprises a complementarity-determining region light chain 1 (CDR-L1) of SEQ ID NO: 898, CDR-L2 of SEQ ID NO: 1440, and CDR-L3 of SEQ ID NO: 1982. In some embodiments, the variable heavy chain comprises a polypeptide consensus sequence having at least 95% sequence identity to the amino acid sequence of SEQ ID NO: 85, and the variable light chain comprises a polypeptide consensus sequence having at least 95% sequence identity to the amino acid sequence of SEQ ID NO: 356. In some embodiments, the antibody or antigen binding fragment thereof binds a human BAIAP2, mouse BAIAP2, rat BAIAP2, bovine BAIAP2, or cynomolgus monkey BAIAP2. In some embodiments, the human BAIAP2 comprises a sequence of SEQ ID NO: 4404.

[0178] Provided herein is an antibody that competes with an antibody or antigen binding fragment of any one of claims 457-460 for binding to BAIAP2, wherein the antibody binds to human BAIAP2 or mouse BAIAP2.

[0179] Provided herein is an antibody or an antigen binding fragment thereof that selectively binds to kelch like ECH associated protein 1, transcript variant 1 (KEAP1) or a variant thereof, comprising at least one of: a variable heavy chain region, wherein the variable heavy chain region comprises a complementarity-determining region heavy chain 1 (CDR-H1) of SEQ ID NO: 628, CDR-H2 of SEQ ID NO: 1170, and CDR-H3 of SEQ ID NO: 1712; and/or a variable light chain region, wherein the variable light chain region comprises a complementarity-determining region light chain 1 (CDR-L1) of SEQ ID NO: 899, CDR-L2 of SEQ ID NO: 1441, and CDR-L3 of SEQ ID NO: 1983. In some embodiments, the variable heavy chain comprises a polypeptide consensus sequence having at least 95% sequence identity to the amino acid sequence of SEQ ID NO: 86, and the variable light chain comprises a polypeptide consensus sequence having at least 95% sequence identity to the amino acid sequence of SEQ ID NO: 357. In some embodiments, the antibody or antigen binding fragment thereof binds a human KEAP1, mouse KEAP1, rat KEAP1, bovine KEAP1, or cynomolgus monkey KEAP1. In some embodiments, the human KEAP1 comprises a sequence of SEQ ID NO: 4385.

[0180] Provided herein is an antibody that competes with an antibody or antigen binding fragment of any one of claims 462-465 for binding to KEAP1, wherein the antibody binds to human KEAP1 or mouse KEAP1.

[0181] Provided herein is an antibody or an antigen binding fragment thereof that selectively binds to RUN and FYVE domain containing 3, transcript variant 2 (RUFY3) or a variant thereof, comprising at least one of: a variable heavy chain region, wherein the variable heavy chain region comprises a complementarity-determining region heavy chain 1 (CDR-H1) of SEQ ID NO: 629, CDR-H2 of SEQ ID NO: 1171, and CDR-H3 of SEQ ID NO: 1713; and/or a variable light chain region, wherein the variable light chain region comprises a complementarity-determining region light chain 1 (CDR-L1) of SEQ ID NO: 900, CDR-L2 of SEQ ID NO: 1442, and CDR-L3 of SEQ ID NO: 1984. In some embodiments, the variable heavy chain comprises a polypeptide consensus sequence having at least 95% sequence identity to the amino acid sequence of SEQ ID NO: 87, and the variable light chain comprises a polypeptide consensus sequence having at least 95% sequence identity to the amino acid sequence of SEQ ID NO: 358. In some embodiments, the antibody or antigen binding fragment thereof binds a human RUFY3, mouse RUFY3, rat RUFY3, bovine RUFY3, or cynomolgus monkey RUFY3. In some embodiments, the human RUFY3 comprises a sequence of SEQ ID NO: 4405.

[0182] Provided herein is an antibody that competes with an antibody or antigen binding fragment of any one of claims 467-470 for binding to RUFY3, wherein the antibody binds to human RUFY3 or mouse RUFY3.

[0183] Provided herein is an antibody or an antigen binding fragment thereof that selectively binds to LIM homeobox 5 (LHX5) or a variant thereof, comprising at least one of: a variable heavy chain region, wherein the variable heavy chain region comprises a complementarity-determining region heavy chain 1 (CDR-H1) of SEQ ID NO: 630, CDR-H2 of SEQ ID NO: 1172, and CDR-H3 of SEQ ID NO: 1714; and/or a variable light chain region, wherein the variable light chain region comprises a complementarity-determining region light chain 1 (CDR-L1) of SEQ ID NO: 901, CDR-L2 of SEQ ID NO: 1443, and CDR-L3 of SEQ ID NO: 1985. In some embodiments, the variable heavy chain comprises a polypeptide consensus sequence having at least 95% sequence identity to the amino acid sequence of SEQ ID NO: 88, and the variable light chain comprises a polypeptide consensus sequence having at least 95% sequence identity to the amino acid sequence of SEQ ID NO: 359. In some embodiments, the antibody or antigen binding fragment thereof binds a human LHX5, mouse LHX5, rat LHX5, bovine LHX5, or cynomolgus monkey LHX5. In some embodiments, the human LHX5 comprises a sequence of SEQ ID NO: 4406.

[0184] Provided herein is an antibody that competes with an antibody or antigen binding fragment of any one of claims 472-475 for binding to LHX5, wherein the antibody binds to human LHX5 or mouse LHX5.

[0185] Provided herein is an antibody or an antigen binding fragment thereof that selectively binds to growth factor receptor bound protein 2, transcript variant 1 (GRB2) or a variant thereof, comprising at least one of: a variable heavy chain region, wherein the variable heavy chain region comprises a complementarity-determining region heavy chain 1 (CDR-H1) of SEQ ID NO: 630, CDR-H2 of SEQ ID NO: 1172, and CDR-H3 of SEQ ID NO: 1714; and/or a variable light chain region, wherein the variable light chain region comprises a complementarity-determining region light chain 1 (CDR-L1) of SEQ ID NO: 901, CDR-L2 of SEQ ID NO: 1443, and CDR-L3 of SEQ ID NO: 1985. In some embodiments, the variable heavy chain comprises a polypeptide consensus sequence having at least 95% sequence identity to the amino acid sequence of SEQ ID NO: 88, and the variable light chain comprises a polypeptide consensus sequence having at least 95% sequence identity to the amino acid sequence of SEQ ID NO: 359. In some embodiments, the antibody or antigen binding fragment thereof binds a human GRB2, mouse GRB2, rat GRB2, bovine GRB2, or cynomolgus monkey GRB2. In some embodiments, the human GRB2 comprises a sequence of SEQ ID NO: 4407.

[0186] Provided herein is an antibody that competes with an antibody or antigen binding fragment of any one of claims 477-480 for binding to GRB2, wherein the antibody binds to human GRB2 or mouse GRB2.

[0187] Provided herein is an antibody or an antigen binding fragment thereof that selectively binds to Tyrosine hydroxylase (TH) or a variant thereof, comprising at least one of: a variable heavy chain region, wherein the variable heavy chain region comprises a complementarity-determining region heavy chain 1 (CDR-H1) of SEQ ID NO: 631, CDR-H2 of SEQ ID NO: 1173, and CDR-H3 of SEQ ID NO: 1715; and/or a variable light chain region, wherein the variable light chain region comprises a complementarity-determining region light chain 1 (CDR-L1) of SEQ ID NO: 902, CDR-L2 of SEQ ID NO: 1444, and CDR-L3 of SEQ ID NO: 1986. In some embodiments, the variable heavy chain comprises a polypeptide consensus sequence having at least 95% sequence identity to the amino acid sequence of SEQ ID NO: 89, and the variable light chain comprises a polypeptide consensus sequence having at least 95% sequence identity to the amino acid sequence of SEQ ID NO: 360. In some embodiments, the antibody or antigen binding fragment thereof binds a human TH, mouse TH, rat TH, bovine TH, or cynomolgus monkey TH. In some embodiments, the human TH comprises a sequence of SEQ ID NO: 4408.

[0188] Provided herein is an antibody that competes with an antibody or antigen binding fragment of any one of claims 482-485 for binding to TH, wherein the antibody binds to human TH or mouse TH.

[0189] Provided herein is an antibody or an antigen binding fragment thereof that selectively binds to leucine rich repeat containing 28, transcript variant 1 (LRRC28) or a variant thereof, comprising at least one of: a variable heavy chain region, wherein the variable heavy chain region comprises a complementarity-determining region heavy chain 1 (CDR-H1) of SEQ ID NO: 633, CDR-H2 of SEQ ID NO: 1175, and CDR-H3 of SEQ ID NO: 1717; and/or a variable light chain region, wherein the variable light chain region comprises a complementarity-determining region light chain 1 (CDR-L1) of SEQ ID NO: 904, CDR-L2 of SEQ ID NO: 1446, and CDR-L3 of SEQ ID NO: 1988. In some embodiments, the variable heavy chain comprises a polypeptide consensus sequence having at least 95% sequence identity to the amino acid sequence of SEQ ID NO: 91, and the variable light chain comprises a polypeptide consensus sequence having at least 95% sequence identity to the amino acid sequence of SEQ ID NO: 362. In some embodiments, the antibody or antigen binding fragment thereof binds a human LRRC28, mouse LRRC28, rat LRRC28, bovine LRRC28, or cynomolgus monkey LRRC28. In some embodiments, the human LRRC28 comprises a sequence of SEQ ID NO: 4409.

[0190] Provided herein is an antibody that competes with an antibody or antigen binding fragment of any one of claims 487-490 for binding to LRRC28, wherein the antibody binds to human LRRC28 or mouse LRRC28.

[0191] Provided herein is an antibody or an antigen binding fragment thereof that selectively binds to spermatogenesis associated 33, transcript variant 2 (SPATA33) or a variant thereof, comprising at least one of: a variable heavy chain region, wherein the variable heavy chain region comprises a complementarity-determining region heavy chain 1 (CDR-H1) of SEQ ID NO: 635, CDR-H2 of SEQ ID NO: 1177, and CDR-H3 of SEQ ID NO: 1719; and/or a variable light chain region, wherein the variable light chain region comprises a complementarity-determining region light chain 1 (CDR-L1) of SEQ ID NO: 906, CDR-L2 of SEQ ID NO: 1448, and CDR-L3 of SEQ ID NO: 1990. In some embodiments, the variable heavy chain comprises a polypeptide consensus sequence having at least 95% sequence identity to the amino acid sequence of SEQ ID NO: 93, and the variable light chain comprises a polypeptide consensus sequence having at least 95% sequence identity to the amino acid sequence of SEQ ID NO: 364. In some embodiments, the antibody or antigen binding fragment thereof binds a human SPATA33, mouse SPATA33, rat SPATA33, bovine SPATA33, or cynomolgus monkey SPATA33. In some embodiments, the human SPATA33 comprises a sequence of SEQ ID NO: 4410.

[0192] Provided herein is an antibody that competes with an antibody or antigen binding fragment of any one of claims 492-495 for binding to SPATA33, wherein the antibody binds to human SPATA33 or mouse SPATA33.

[0193] Provided herein is an antibody or an antigen binding fragment thereof that selectively binds to Atpase secretory pathway ca2+ transporting 1 (ATP2C1) or a variant thereof, comprising at least one of: a variable heavy chain region, wherein the variable heavy chain region comprises a complementarity-determining region heavy chain 1 (CDR-H1) of SEQ ID NO: 636, CDR-H2 of SEQ ID NO: 1178, and CDR-H3 of SEQ ID NO: 1720; and/or a variable light chain region, wherein the variable light chain region comprises a complementarity-determining region light chain 1 (CDR-L1) of SEQ ID NO: 907, CDR-L2 of SEQ ID NO: 1449, and CDR-L3 of SEQ ID NO: 1991. In some embodiments, the variable heavy chain comprises a polypeptide consensus sequence having at least 95% sequence identity to the amino acid sequence of SEQ ID NO: 94, and the variable light chain comprises a polypeptide consensus sequence having at least 95% sequence identity to the amino acid sequence of SEQ ID NO: 365. In some embodiments, the antibody or antigen binding fragment thereof binds a human ATP2C1, mouse ATP2C1, rat ATP2C1, bovine ATP2C1, or cynomolgus monkey ATP2C1. In some embodiments, the human ATP2C1 comprises a sequence of SEQ ID NO: 4411.

[0194] Provided herein is an antibody that competes with an antibody or antigen binding fragment of any one of claims 497-500 for binding to ATP2C1, wherein the antibody binds to human ATP2C1 or mouse ATP2C1.

[0195] Provided herein is an antibody or an antigen binding fragment thereof that selectively binds to teashirt zinc finger homeobox 2, transcript variant 1 (TSHZ2) or a variant thereof, comprising at least one of: a variable heavy chain region, wherein the variable heavy chain region comprises a complementarity-determining region heavy chain 1 (CDR-H1) of SEQ ID NO: 636, CDR-H2 of SEQ ID NO: 1178, and CDR-H3 of SEQ ID NO: 1720; and/or a variable light chain region, wherein the variable light chain region comprises a complementarity-determining region light chain 1 (CDR-L1) of SEQ ID NO: 907, CDR-L2 of SEQ ID NO: 1449, and CDR-L3 of SEQ ID NO: 1991. In some embodiments, the variable heavy chain comprises a polypeptide consensus sequence having at least 95% sequence identity to the amino acid sequence of SEQ ID NO: 94, and the variable light chain comprises a polypeptide consensus sequence having at least 95% sequence identity to the amino acid sequence of SEQ ID NO: 365. In some embodiments, the antibody or antigen binding fragment thereof binds a human TSHZ2, mouse TSHZ2, rat TSHZ2, bovine TSHZ2, or cynomolgus monkey TSHZ2. In some embodiments, the human TSHZ2 comprises a sequence of SEQ ID NO: 4412.

[0196] Provided herein is an antibody that competes with an antibody or antigen binding fragment of any one of claims 502-505 for binding to TSHZ2, wherein the antibody binds to human TSHZ2 or mouse TSHZ2.

[0197] Provided herein is an antibody or an antigen binding fragment thereof that selectively binds to Complement component 4 binding protein beta (C4BPB) or a variant thereof, comprising at least one of: a variable heavy chain region, wherein the variable heavy chain region comprises a complementarity-determining region heavy chain 1 (CDR-H1) of SEQ ID NO: 639, CDR-H2 of SEQ ID NO: 1181, and CDR-H3 of SEQ ID NO: 1723; and/or a variable light chain region, wherein the variable light chain region comprises a complementarity-determining region light chain 1 (CDR-L1) of SEQ ID NO: 910, CDR-L2 of SEQ ID NO: 1452, and CDR-L3 of SEQ ID NO: 1994. In some embodiments, the variable heavy chain comprises a polypeptide consensus sequence having at least 95% sequence identity to the amino acid sequence of SEQ ID NO: 97, and the variable light chain comprises a polypeptide consensus sequence having at least 95% sequence identity to the amino acid sequence of SEQ ID NO: 368. In some embodiments, the antibody or antigen binding fragment thereof binds a human C4BPB, mouse C4BPB, rat C4BPB, bovine C4BPB, or cynomolgus monkey C4BPB. In some embodiments, the human C4BPB comprises a sequence of SEQ ID NO: 4413.

[0198] Provided herein is an antibody that competes with an antibody or antigen binding fragment of any one of claims 507-510 for binding to C4BPB, wherein the antibody binds to human C4BPB or mouse C4BPB.

[0199] Provided herein is an antibody or an antigen binding fragment thereof that selectively binds to NCCRP1, F-box associated domain containing (NCCRP1) or a variant thereof, comprising at least one of: a variable heavy chain region, wherein the variable heavy chain region comprises a complementarity-determining region heavy chain 1 (CDR-H1) of SEQ ID NO: 640, CDR-H2 of SEQ ID NO: 1182, and CDR-H3 of SEQ ID NO: 1724; and/or a variable light chain region, wherein the variable light chain region comprises a complementarity-determining region light chain 1 (CDR-L1) of SEQ ID NO: 911, CDR-L2 of SEQ ID NO: 1453, and CDR-L3 of SEQ ID NO: 1995. In some embodiments, the variable heavy chain comprises a polypeptide consensus sequence having at least 95% sequence identity to the amino acid sequence of SEQ ID NO: 98, and the variable light chain comprises a polypeptide consensus sequence having at least 95% sequence identity to the amino acid sequence of SEQ ID NO: 369. In some embodiments, the antibody or antigen binding fragment thereof binds a human NCCRP1, mouse NCCRP1, rat NCCRP1, bovine NCCRP1, or cynomolgus monkey NCCRP1. In some embodiments, the human NCCRP1 comprises a sequence of SEQ ID NO: 4414.

[0200] Provided herein is an antibody that competes with an antibody or antigen binding fragment of any one of claims 512-515 for binding to NCCRP1, wherein the antibody binds to human NCCRP1 or mouse NCCRP1.

[0201] Provided herein is an antibody or an antigen binding fragment thereof that selectively binds to coiled-coil domain containing 102A, transcript variant X1 (CCDC102A) or a variant thereof, comprising at least one of: a variable heavy chain region, wherein the variable heavy chain region comprises a complementarity-determining region heavy chain 1 (CDR-H1) of SEQ ID NO: 640, CDR-H2 of SEQ ID NO: 1182, and CDR-H3 of SEQ ID NO: 1724; and/or a variable light chain region, wherein the variable light chain region comprises a complementarity-determining region light chain 1 (CDR-L1) of SEQ ID NO: 911, CDR-L2 of SEQ ID NO: 1453, and CDR-L3 of SEQ ID NO: 1995. In some embodiments, the variable heavy chain comprises a polypeptide consensus sequence having at least 95% sequence identity to the amino acid sequence of SEQ ID NO: 98, and the variable light chain comprises a polypeptide consensus sequence having at least 95% sequence identity to the amino acid sequence of SEQ ID NO: 369. In some embodiments, the antibody or antigen binding fragment thereof binds a human CCDC102A, mouse CCDC102A, rat CCDC102A, bovine CCDC102A, or cynomolgus monkey CCDC102A. In some embodiments, the human CCDC102A comprises a sequence of SEQ ID NO: 4415.

[0202] Provided herein is an antibody that competes with an antibody or antigen binding fragment of any one of claims 517-520 for binding to CCDC102A, wherein the antibody binds to human CCDC102A or mouse CCDC102A.

[0203] Provided herein is an antibody or an antigen binding fragment thereof that selectively binds to RNA binding motif protein 47, transcript variant X10 (RBM47) or a variant thereof, comprising at least one of: a variable heavy chain region, wherein the variable heavy chain region comprises a complementarity-determining region heavy chain 1 (CDR-H1) of SEQ ID NO: 641, CDR-H2 of SEQ ID NO: 1183, and CDR-H3 of SEQ ID NO: 1725; and/or a variable light chain region, wherein the variable light chain region comprises a complementarity-determining region light chain 1 (CDR-L1) of SEQ ID NO: 912, CDR-L2 of SEQ ID NO: 1454, and CDR-L3 of SEQ ID NO: 1996. In some embodiments, the variable heavy chain comprises a polypeptide consensus sequence having at least 95% sequence identity to the amino acid sequence of SEQ ID NO: 99, and the variable light chain comprises a polypeptide consensus sequence having at least 95% sequence identity to the amino acid sequence of SEQ ID NO: 370. In some embodiments, the antibody or antigen binding fragment thereof binds a human RBM47, mouse RBM47, rat RBM47, bovine RBM47, or cynomolgus monkey RBM47. In some embodiments, the human RBM47 comprises a sequence of SEQ ID NO: 4416.

[0204] Provided herein is an antibody that competes with an antibody or antigen binding fragment of any one of claims 522-525 for binding to RBM47, wherein the antibody binds to human RBM47 or mouse RBM47.

[0205] Provided herein is an antibody or an antigen binding fragment thereof that selectively binds to RAD1 checkpoint DNA exonuclease, transcript variant 1 (RAD1) or a variant thereof, comprising at least one of: a variable heavy chain region, wherein the variable heavy chain region comprises a complementarity-determining region heavy chain 1 (CDR-H1) of SEQ ID NO: 643, CDR-H2 of SEQ ID NO: 1185, and CDR-H3 of SEQ ID NO: 1727; and/or a variable light chain region, wherein the variable light chain region comprises a complementarity-determining region light chain 1 (CDR-L1) of SEQ ID NO: 914, CDR-L2 of SEQ ID NO: 1456, and CDR-L3 of SEQ ID NO: 1998. In some embodiments, the variable heavy chain comprises a polypeptide consensus sequence having at least 95% sequence identity to the amino acid sequence of SEQ ID NO: 101, and the variable light chain comprises a polypeptide consensus sequence having at least 95% sequence identity to the amino acid sequence of SEQ ID NO: 372. In some embodiments, the antibody or antigen binding fragment thereof binds a human RAD1, mouse RAD1, rat RAD1, bovine RAD1, or cynomolgus monkey RAD1. In some embodiments, the human RAD1 comprises a sequence of SEQ ID NO: 4417.

[0206] Provided herein is an antibody that competes with an antibody or antigen binding fragment of any one of claims 527-530 for binding to RAD1, wherein the antibody binds to human RAD1 or mouse RAD.

[0207] Provided herein is an antibody or an antigen binding fragment thereof that selectively binds to Microtubule associated scaffold protein 1 (MTUS1) or a variant thereof, comprising at least one of: a variable heavy chain region, wherein the variable heavy chain region comprises a complementarity-determining region heavy chain 1 (CDR-H1) of SEQ ID NO: 643, CDR-H2 of SEQ ID NO: 1185, and CDR-H3 of SEQ ID NO: 1727; and/or a variable light chain region, wherein the variable light chain region comprises a complementarity-determining region light chain 1 (CDR-L1) of SEQ ID NO: 914, CDR-L2 of SEQ ID NO: 1456, and CDR-L3 of SEQ ID NO: 1998. In some embodiments, the variable heavy chain comprises a polypeptide consensus sequence having at least 95% sequence identity to the amino acid sequence of SEQ ID NO: 101, and the variable light chain comprises a polypeptide consensus sequence having at least 95% sequence identity to the amino acid sequence of SEQ ID NO: 372. In some embodiments, the antibody or antigen binding fragment thereof binds a human MTUS1, mouse MTUS1, rat MTUS1, bovine MTUS1, or cynomolgus monkey MTUS1. In some embodiments, the human MTUS1 comprises a sequence of SEQ ID NO: 4418.

[0208] Provided herein is an antibody that competes with an antibody or antigen binding fragment of any one of claims 532-535 for binding to MTUS1, wherein the antibody binds to human MTUS1 or mouse MTUS1.

[0209] Provided herein is an antibody or an antigen binding fragment thereof that selectively binds to kelch like ECH associated protein 1, transcript variant 1 (KEAP1) or a variant thereof, comprising at least one of: a variable heavy chain region, wherein the variable heavy chain region comprises a complementarity-determining region heavy chain 1 (CDR-H1) of SEQ ID NO: 645, CDR-H2 of SEQ ID NO: 1187, and CDR-H3 of SEQ ID NO: 1729; and/or a variable light chain region, wherein the variable light chain region comprises a complementarity-determining region light chain 1 (CDR-L1) of SEQ ID NO: 916, CDR-L2 of SEQ ID NO: 1458, and CDR-L3 of SEQ ID NO: 2000. In some embodiments, the variable heavy chain comprises a polypeptide consensus sequence having at least 95% sequence identity to the amino acid sequence of SEQ ID NO: 103, and the variable light chain comprises a polypeptide consensus sequence having at least 95% sequence identity to the amino acid sequence of SEQ ID NO: 374. In some embodiments, the antibody or antigen binding fragment thereof binds a human KEAP1, mouse KEAP1, rat KEAP1, bovine KEAP1, or cynomolgus monkey KEAP1. In some embodiments, the human KEAP1 comprises a sequence of SEQ ID NO: 4385.

[0210] Provided herein is an antibody that competes with an antibody or antigen binding fragment of any one of claims 537-540 for binding to KEAP1, wherein the antibody binds to human KEAP1 or mouse KEAP1.

[0211] Provided herein is an antibody or an antigen binding fragment thereof that selectively binds to PNMA family member 5, transcript variant 2 (PNMA5) or a variant thereof, comprising at least one of: a variable heavy chain region, wherein the variable heavy chain region comprises a complementarity-determining region heavy chain 1 (CDR-H1) of SEQ ID NO: 646, CDR-H2 of SEQ ID NO: 1188, and CDR-H3 of SEQ ID NO: 1730; and/or a variable light chain region, wherein the variable light chain region comprises a complementarity-determining region light chain 1 (CDR-L1) of SEQ ID NO: 917, CDR-L2 of SEQ ID NO: 1459, and CDR-L3 of SEQ ID NO: 2001. In some embodiments, the variable heavy chain comprises a polypeptide consensus sequence having at least 95% sequence identity to the amino acid sequence of SEQ ID NO: 104, and the variable light chain comprises a polypeptide consensus sequence having at least 95% sequence identity to the amino acid sequence of SEQ ID NO: 375. In some embodiments, the antibody or antigen binding fragment thereof binds a human PNMA5, mouse PNMA5, rat PNMA5, bovine PNMA5, or cynomolgus monkey PNMA5. In some embodiments, the human PNMA5 comprises a sequence of SEQ ID NO: 4357.

[0212] Provided herein is an antibody that competes with an antibody or antigen binding fragment of any one of claims 542-545 for binding to PNMA5, wherein the antibody binds to human PNMA5 or mouse PNMA5.

[0213] Provided herein is an antibody or an antigen binding fragment thereof that selectively binds to G protein-coupled receptor 83, transcript variant 1 (GPR83) or a variant thereof, comprising at least one of: a variable heavy chain region, wherein the variable heavy chain region comprises a complementarity-determining region heavy chain 1 (CDR-H1) of SEQ ID NO: 650, CDR-H2 of SEQ ID NO: 1192, and CDR-H3 of SEQ ID NO: 1734; and/or a variable light chain region, wherein the variable light chain region comprises a complementarity-determining region light chain 1 (CDR-L1) of SEQ ID NO: 921, CDR-L2 of SEQ ID NO: 1463, and CDR-L3 of SEQ ID NO: 2005. In some embodiments, the variable heavy chain comprises a polypeptide consensus sequence having at least 95% sequence identity to the amino acid sequence of SEQ ID NO: 108, and the variable light chain comprises a polypeptide consensus sequence having at least 95% sequence identity to the amino acid sequence of SEQ ID NO: 379. In some embodiments, the antibody or antigen binding fragment thereof binds a human GPR83, mouse GPR83, rat GPR83, bovine GPR83, or cynomolgus monkey GPR83. In some embodiments, the human GPR83 comprises a sequence of SEQ ID NO: 4419.

[0214] Provided herein is an antibody that competes with an antibody or antigen binding fragment of any one of claims 547-550 for binding to GPR83, wherein the antibody binds to human GPR83 or mouse GPR83.

[0215] Provided herein is an antibody or an antigen binding fragment thereof that selectively binds to CDP-diacylglycerol synthase 1 (CDS1) or a variant thereof, comprising at least one of: a variable heavy chain region, wherein the variable heavy chain region comprises a complementarity-determining region heavy chain 1 (CDR-H1) of SEQ ID NO: 651, CDR-H2 of SEQ ID NO: 1193, and CDR-H3 of SEQ ID NO: 1735; and/or a variable light chain region, wherein the variable light chain region comprises a complementarity-determining region light chain 1 (CDR-L1) of SEQ ID NO: 922, CDR-L2 of SEQ ID NO: 1464, and CDR-L3 of SEQ ID NO: 2006. In some embodiments, the variable heavy chain comprises a polypeptide consensus sequence having at least 95% sequence identity to the amino acid sequence of SEQ ID NO: 109, and the variable light chain comprises a polypeptide consensus sequence having at least 95% sequence identity to the amino acid sequence of SEQ ID NO: 380. In some embodiments, the antibody or antigen binding fragment thereof binds a human CDS1, mouse CDS1, rat CDS1, bovine CDS1, or cynomolgus monkey CDS1. In some embodiments, the human CDS1 comprises a sequence of SEQ ID NO: 4420.

[0216] Provided herein is an antibody that competes with an antibody or antigen binding fragment of any one of claims 552-555 for binding to CDS1, wherein the antibody binds to human CDS1 or mouse CDS1.

[0217] Provided herein is an antibody or an antigen binding fragment thereof that selectively binds to dynein axonemal assembly factor 3, transcript variant 3 (DNAAF3) or a variant thereof, comprising at least one of: a variable heavy chain region, wherein the variable heavy chain region comprises a complementarity-determining region heavy chain 1 (CDR-H1) of SEQ ID NO: 651, CDR-H2 of SEQ ID NO: 1193, and CDR-H3 of SEQ ID NO: 1735; and/or a variable light chain region, wherein the variable light chain region comprises a complementarity-determining region light chain 1 (CDR-L1) of SEQ ID NO: 922, CDR-L2 of SEQ ID NO: 1464, and CDR-L3 of SEQ ID NO: 2006. In some embodiments, the variable heavy chain comprises a polypeptide consensus sequence having at least 95% sequence identity to the amino acid sequence of SEQ ID NO: 109, and the variable light chain comprises a polypeptide consensus sequence having at least 95% sequence identity to the amino acid sequence of SEQ ID NO: 380. In some embodiments, the antibody or antigen binding fragment thereof binds a human DNAAF3, mouse DNAAF3, rat DNAAF3, bovine DNAAF3, or cynomolgus monkey DNAAF3. In some embodiments, the human DNAAF3 comprises a sequence of SEQ ID NO: 4421.

[0218] Provided herein is an antibody that competes with an antibody or antigen binding fragment of any one of claims 557-560 for binding to DNAAF3, wherein the antibody binds to human DNAAF3 or mouse DNAAF3.

[0219] Provided herein is an antibody or an antigen binding fragment thereof that selectively binds to copine 1, transcript variant 2 (CPNE1) or a variant thereof, comprising at least one of: a variable heavy chain region, wherein the variable heavy chain region comprises a complementarity-determining region heavy chain 1 (CDR-H1) of SEQ ID NO: 652, CDR-H2 of SEQ ID NO: 1194, and CDR-H3 of SEQ ID NO: 1736; and/or a variable light chain region, wherein the variable light chain region comprises a complementarity-determining region light chain 1 (CDR-L1) of SEQ ID NO: 923, CDR-L2 of SEQ ID NO: 1465, and CDR-L3 of SEQ ID NO: 2007. In some embodiments, the variable heavy chain comprises a polypeptide consensus sequence having at least 95% sequence identity to the amino acid sequence of SEQ ID NO: 110, and the variable light chain comprises a polypeptide consensus sequence having at least 95% sequence identity to the amino acid sequence of SEQ ID NO: 381. In some embodiments, the antibody or antigen binding fragment thereof binds a human CPNE1, mouse CPNE1, rat CPNE1, bovine CPNE1, or cynomolgus monkey CPNE1. In some embodiments, the human CPNE1 comprises a sequence of SEQ ID NO: 4422.

[0220] Provided herein is an antibody that competes with an antibody or antigen binding fragment of any one of claims 562-565 for binding to CPNE1, wherein the antibody binds to human CPNE1 or mouse CPNE1.

[0221] Provided herein is an antibody or an antigen binding fragment thereof that selectively binds to aarF domain containing kinase 5 (ADCK5) or a variant thereof, comprising at least one of: a variable heavy chain region, wherein the variable heavy chain region comprises a complementarity-determining region heavy chain 1 (CDR-H1) of SEQ ID NO: 653, CDR-H2 of SEQ ID NO: 1195, and CDR-H3 of SEQ ID NO: 1737; and/or a variable light chain region, wherein the variable light chain region comprises a complementarity-determining region light chain 1 (CDR-L1) of SEQ ID NO: 924, CDR-L2 of SEQ ID NO: 1466, and CDR-L3 of SEQ ID NO: 2008. In some embodiments, the variable heavy chain comprises a polypeptide consensus sequence having at least 95% sequence identity to the amino acid sequence of SEQ ID NO: 111, and the variable light chain comprises a polypeptide consensus sequence having at least 95% sequence identity to the amino acid sequence of SEQ ID NO: 382. In some embodiments, the antibody or antigen binding fragment thereof binds a human ADCK5, mouse ADCK5, rat ADCK5, bovine ADCK5, or cynomolgus monkey ADCK5. In some embodiments, the human ADCK5 comprises a sequence of SEQ ID NO: 4423.

[0222] Provided herein is an antibody that competes with an antibody or antigen binding fragment of any one of claims 567-570 for binding to ADCK5, wherein the antibody binds to human ADCK5 or mouse ADCK5.

[0223] Provided herein is an antibody or an antigen binding fragment thereof that selectively binds to crystallin alpha B, transcript variant 2 (CRYAB) or a variant thereof, comprising at least one of: a variable heavy chain region, wherein the variable heavy chain region comprises a complementarity-determining region heavy chain 1 (CDR-H1) of SEQ ID NO: 655, CDR-H2 of SEQ ID NO: 1197, and CDR-H3 of SEQ ID NO: 1739; and/or a variable light chain region, wherein the variable light chain region comprises a complementarity-determining region light chain 1 (CDR-L1) of SEQ ID NO: 926, CDR-L2 of SEQ ID NO: 1468, and CDR-L3 of SEQ ID NO: 2010. In some embodiments, the variable heavy chain comprises a polypeptide consensus sequence having at least 95% sequence identity to the amino acid sequence of SEQ ID NO: 113, and the variable light chain comprises a polypeptide consensus sequence having at least 95% sequence identity to the amino acid sequence of SEQ ID NO: 384. In some embodiments, the antibody or antigen binding fragment thereof binds a human CRYAB, mouse CRYAB, rat CRYAB, bovine CRYAB, or cynomolgus monkey CRYAB. In some embodiments, the human CRYAB comprises a sequence of SEQ ID NO: 4424.

[0224] Provided herein is an antibody that competes with an antibody or antigen binding fragment of any one of claims 572-575 for binding to CRYAB, wherein the antibody binds to human CRYAB or mouse CRYAB.

[0225] Provided herein is an antibody or an antigen binding fragment thereof that selectively binds to hematopoietic cell-specific Lyn substrate 1, transcript variant 1 (HCLS1) or a variant thereof, comprising at least one of: a variable heavy chain region, wherein the variable heavy chain region comprises a complementarity-determining region heavy chain 1 (CDR-H1) of SEQ ID NO: 656, CDR-H2 of SEQ ID NO: 1198, and CDR-H3 of SEQ ID NO: 1740; and/or a variable light chain region, wherein the variable light chain region comprises a complementarity-determining region light chain 1 (CDR-L1) of SEQ ID NO: 927, CDR-L2 of SEQ ID NO: 1469, and CDR-L3 of SEQ ID NO: 2011. In some embodiments, the variable heavy chain comprises a polypeptide consensus sequence having at least 95% sequence identity to the amino acid sequence of SEQ ID NO: 114, and the variable light chain comprises a polypeptide consensus sequence having at least 95% sequence identity to the amino acid sequence of SEQ ID NO: 385. In some embodiments, the antibody or antigen binding fragment thereof binds a human HCLS1, mouse HCLS1, rat HCLS1, bovine HCLS1, or cynomolgus monkey HCLS1. In some embodiments, the human HCLS1 comprises a sequence of SEQ ID NO: 4425.

[0226] Provided herein is an antibody that competes with an antibody or antigen binding fragment of any one of claims 577-580 for binding to HCLS1, wherein the antibody binds to human HCLS1 or mouse HCLS1.

[0227] Provided herein is an antibody or an antigen binding fragment thereof that selectively binds to aldo-keto reductase family 1 member B, transcript variant 1 (AKR1B1) or a variant thereof, comprising at least one of: a variable heavy chain region, wherein the variable heavy chain region comprises a complementarity-determining region heavy chain 1 (CDR-H1) of SEQ ID NO: 657, CDR-H2 of SEQ ID NO: 1199, and CDR-H3 of SEQ ID NO: 1741; and/or a variable light chain region, wherein the variable light chain region comprises a complementarity-determining region light chain 1 (CDR-L1) of SEQ ID NO: 928, CDR-L2 of SEQ ID NO: 1470, and CDR-L3 of SEQ ID NO: 2012. In some embodiments, the variable heavy chain comprises a polypeptide consensus sequence having at least 95% sequence identity to the amino acid sequence of SEQ ID NO: 115, and the variable light chain comprises a polypeptide consensus sequence having at least 95% sequence identity to the amino acid sequence of SEQ ID NO: 386. In some embodiments, the antibody or antigen binding fragment thereof binds a human AKR1B1, mouse AKR1B1, rat AKR1B1, bovine AKR1B1, or cynomolgus monkey AKR1B1. In some embodiments, the human AKR1B1 comprises a sequence of SEQ ID NO: 4426.

[0228] Provided herein is an antibody that competes with an antibody or antigen binding fragment of any one of claims 582-585 for binding to AKR1B1, wherein the antibody binds to human AKR1B1 or mouse AKR1B1.

[0229] Provided herein is an antibody or an antigen binding fragment thereof that selectively binds to surfeit 6, transcript variant 1 (SURF6) or a variant thereof, comprising at least one of: a variable heavy chain region, wherein the variable heavy chain region comprises a complementarity-determining region heavy chain 1 (CDR-H1) of SEQ ID NO: 658, CDR-H2 of SEQ ID NO: 1200, and CDR-H3 of SEQ ID NO: 1742; and/or a variable light chain region, wherein the variable light chain region comprises a complementarity-determining region light chain 1 (CDR-L1) of SEQ ID NO: 929, CDR-L2 of SEQ ID NO: 1471, and CDR-L3 of SEQ ID NO: 2013. In some embodiments, the variable heavy chain comprises a polypeptide consensus sequence having at least 95% sequence identity to the amino acid sequence of SEQ ID NO: 116, and the variable light chain comprises a polypeptide consensus sequence having at least 95% sequence identity to the amino acid sequence of SEQ ID NO: 387. In some embodiments, the antibody or antigen binding fragment thereof binds a human SURF6, mouse SURF6, rat SURF6, bovine SURF6, or cynomolgus monkey SURF6. In some embodiments, the human SURF6 comprises a sequence of SEQ ID NO: 4427.

[0230] Provided herein is an antibody that competes with an antibody or antigen binding fragment of any one of claims 587-590 for binding to SURF6, wherein the antibody binds to human SURF6 or mouse SURF6.

[0231] Provided herein is an antibody or an antigen binding fragment thereof that selectively binds to proliferating cell nuclear antigen, transcript variant 1 (PCNA) or a variant thereof, comprising at least one of: a variable heavy chain region, wherein the variable heavy chain region comprises a complementarity-determining region heavy chain 1 (CDR-H1) of SEQ ID NO: 658, CDR-H2 of SEQ ID NO: 1200, and CDR-H3 of SEQ ID NO: 1742; and/or a variable light chain region, wherein the variable light chain region comprises a complementarity-determining region light chain 1 (CDR-L1) of SEQ ID NO: 929, CDR-L2 of SEQ ID NO: 1471, and CDR-L3 of SEQ ID NO: 2013. In some embodiments, the variable heavy chain comprises a polypeptide consensus sequence having at least 95% sequence identity to the amino acid sequence of SEQ ID NO: 116, and the variable light chain comprises a polypeptide consensus sequence having at least 95% sequence identity to the amino acid sequence of SEQ ID NO: 387. In some embodiments, the antibody or antigen binding fragment thereof binds a human PCNA, mouse PCNA, rat PCNA, bovine PCNA, or cynomolgus monkey PCNA. In some embodiments, the human PCNA comprises a sequence of SEQ ID NO: 4428.

[0232] Provided herein is an antibody that competes with an antibody or antigen binding fragment of any one of claims 592-595 for binding to PCNA, wherein the antibody binds to human PCNA or mouse PCNA.

[0233] Provided herein is an antibody or an antigen binding fragment thereof that selectively binds to S100 calcium binding protein B (S100B) or a variant thereof, comprising at least one of: a variable heavy chain region, wherein the variable heavy chain region comprises a complementarity-determining region heavy chain 1 (CDR-H1) of SEQ ID NO: 663, CDR-H2 of SEQ ID NO: 1205, and CDR-H3 of SEQ ID NO: 1747; and/or a variable light chain region, wherein the variable light chain region comprises a complementarity-determining region light chain 1 (CDR-L1) of SEQ ID NO: 934, CDR-L2 of SEQ ID NO: 1476, and CDR-L3 of SEQ ID NO: 2018. In some embodiments, the variable heavy chain comprises a polypeptide consensus sequence having at least 95% sequence identity to the amino acid sequence of SEQ ID NO: 121, and the variable light chain comprises a polypeptide consensus sequence having at least 95% sequence identity to the amino acid sequence of SEQ ID NO: 392. In some embodiments, he antibody or antigen binding fragment thereof binds a human S100B, mouse S100B, rat S100B, bovine S100B, or cynomolgus monkey S100B. In some embodiments, the human S100B comprises a sequence of SEQ ID NO: 4429.

[0234] Provided herein is an antibody that competes with an antibody or antigen binding fragment of any one of claims 597-600 for binding to S100B, wherein the antibody binds to human S100B or mouse S100B.

[0235] Provided herein is an antibody or an antigen binding fragment thereof that selectively binds to checkpoint kinase 2, transcript variant 3 (CHEK2) or a variant thereof, comprising at least one of: a variable heavy chain region, wherein the variable heavy chain region comprises a complementarity-determining region heavy chain 1 (CDR-H1) of SEQ ID NO: 664, CDR-H2 of SEQ ID NO: 1206, and CDR-H3 of SEQ ID NO: 1748; and/or a variable light chain region, wherein the variable light chain region comprises a complementarity-determining region light chain 1 (CDR-L1) of SEQ ID NO: 935, CDR-L2 of SEQ ID NO: 1477, and CDR-L3 of SEQ ID NO: 2019. In some embodiments, the variable heavy chain comprises a polypeptide consensus sequence having at least 95% sequence identity to the amino acid sequence of SEQ ID NO: 122, and the variable light chain comprises a polypeptide consensus sequence having at least 95% sequence identity to the amino acid sequence of SEQ ID NO: 393. In some embodiments, the antibody or antigen binding fragment thereof binds a human CHEK2, mouse CHEK2, rat CHEK2, bovine CHEK2, or cynomolgus monkey CHEK2. In some embodiments, the human CHEK2 comprises a sequence of SEQ ID NO: 4430.

[0236] Provided herein is an antibody that competes with an antibody or antigen binding fragment of any one of claims 602-605 for binding to CHEK2, wherein the antibody binds to human CHEK2 or mouse CHEK2.

[0237] Provided herein is an antibody or an antigen binding fragment thereof that selectively binds to ankyrin repeat domain 53, transcript variant 2 (ANKRD53) or a variant thereof, comprising at least one of: a variable heavy chain region, wherein the variable heavy chain region comprises a complementarity-determining region heavy chain 1 (CDR-H1) of SEQ ID NO: 670, CDR-H2 of SEQ ID NO: 1212, and CDR-H3 of SEQ ID NO: 1754; and/or a variable light chain region, wherein the variable light chain region comprises a complementarity-determining region light chain 1 (CDR-L1) of SEQ ID NO: 941, CDR-L2 of SEQ ID NO: 1483, and CDR-L3 of SEQ ID NO: 2025. In some embodiments, the variable heavy chain comprises a polypeptide consensus sequence having at least 95% sequence identity to the amino acid sequence of SEQ ID NO: 128, and

[0238] the variable light chain comprises a polypeptide consensus sequence having at least 95% sequence identity to the amino acid sequence of SEQ ID NO: 399. In some embodiments, the antibody or antigen binding fragment thereof binds a human ANKRD53, mouse ANKRD53, rat ANKRD53, bovine ANKRD53, or cynomolgus monkey ANKRD53. In some embodiments, the human ANKRD53 comprises a sequence of SEQ ID NO: 4431.

[0239] Provided herein is an antibody that competes with an antibody or antigen binding fragment of any one of claims 607-610 for binding to ANKRD53, wherein the antibody binds to human ANKRD53 or mouse ANKRD53.

[0240] Provided herein is an antibody or an antigen binding fragment thereof that selectively binds to Killer cell lectin like receptor g2 (KLRG2) or a variant thereof, comprising at least one of: a variable heavy chain region, wherein the variable heavy chain region comprises a complementarity-determining region heavy chain 1 (CDR-H1) of SEQ ID NO: 683, CDR-H2 of SEQ ID NO: 1225, and CDR-H3 of SEQ ID NO: 1767; and/or a variable light chain region, wherein the variable light chain region comprises a complementarity-determining region light chain 1 (CDR-L1) of SEQ ID NO: 954, CDR-L2 of SEQ ID NO: 1496, and CDR-L3 of SEQ ID NO: 2038. In some embodiments, the variable heavy chain comprises a polypeptide consensus sequence having at least 95% sequence identity to the amino acid sequence of SEQ ID NO: 141, and the variable light chain comprises a polypeptide consensus sequence having at least 95% sequence identity to the amino acid sequence of SEQ ID NO: 412. In some embodiments, the antibody or antigen binding fragment thereof binds a human KLRG2, mouse KLRG2, rat KLRG2, bovine KLRG2, or cynomolgus monkey KLRG2. In some embodiments, the human KLRG2 comprises a sequence of SEQ ID NO: 4432.

[0241] Provided herein is an antibody that competes with an antibody or antigen binding fragment of any one of claims 612-615 for binding to KLRG2, wherein the antibody binds to human KLRG2 or mouse KLRG2.

[0242] Provided herein is an antibody or an antigen binding fragment thereof that selectively binds to tripartite motif containing 35, transcript variant 1 (TRIM35) or a variant thereof, comprising at least one of: a variable heavy chain region, wherein the variable heavy chain region comprises a complementarity-determining region heavy chain 1 (CDR-H1) of SEQ ID NO: 683, CDR-H2 of SEQ ID NO: 1225, and CDR-H3 of SEQ ID NO: 1767; and/or a variable light chain region, wherein the variable light chain region comprises a complementarity-determining region light chain 1 (CDR-L1) of SEQ ID NO: 954, CDR-L2 of SEQ ID NO: 1496, and CDR-L3 of SEQ ID NO: 2038. In some embodiments, the variable heavy chain comprises a polypeptide consensus sequence having at least 95% sequence identity to the amino acid sequence of SEQ ID NO: 141, and the variable light chain comprises a polypeptide consensus sequence having at least 95% sequence identity to the amino acid sequence of SEQ ID NO: 412. In some embodiments, the antibody or antigen binding fragment thereof binds a human TRIM35, mouse TRIM35, rat TRIM35, bovine TRIM35, or cynomolgus monkey TRIM35. In some embodiments, the human TRIM35 comprises a sequence of SEQ ID NO: 4433.

[0243] Provided herein is an antibody that competes with an antibody or antigen binding fragment of any one of claims 617-620 for binding to TRIM35, wherein the antibody binds to human TRIM35 or mouse TRIM35.

[0244] Provided herein is an antibody or an antigen binding fragment thereof that selectively binds to FMR1 autosomal homolog 2 (FXR2) or a variant thereof, comprising at least one of: a variable heavy chain region, wherein the variable heavy chain region comprises a complementarity-determining region heavy chain 1 (CDR-H1) of SEQ ID NO: 683, CDR-H2 of SEQ ID NO: 1225, and CDR-H3 of SEQ ID NO: 1767; and/or a variable light chain region, wherein the variable light chain region comprises a complementarity-determining region light chain 1 (CDR-L1) of SEQ ID NO: 954, CDR-L2 of SEQ ID NO: 1496, and CDR-L3 of SEQ ID NO: 2038. In some embodiments, the variable heavy chain comprises a polypeptide consensus sequence having at least 95% sequence identity to the amino acid sequence of SEQ ID NO: 141, and the variable light chain comprises a polypeptide consensus sequence having at least 95% sequence identity to the amino acid sequence of SEQ ID NO: 412. In some embodiments, the antibody or antigen binding fragment thereof binds a human FXR2, mouse FXR2, rat FXR2, bovine FXR2, or cynomolgus monkey FXR2. In some embodiments, the human FXR2 comprises a sequence of SEQ ID NO: 4434.

[0245] Provided herein is an antibody that competes with an antibody or antigen binding fragment of any one of claims 622-625 for binding to FXR2, wherein the antibody binds to human FXR2 or mouse FXR2.

[0246] Provided herein is an antibody or an antigen binding fragment thereof that selectively binds to annexin A1 (ANXA1) or a variant thereof, comprising at least one of: a variable heavy chain region, wherein the variable heavy chain region comprises a complementarity-determining region heavy chain 1 (CDR-H1) of SEQ ID NO: 686, CDR-H2 of SEQ ID NO: 1228, and CDR-H3 of SEQ ID NO: 1770; and/or a variable light chain region, wherein the variable light chain region comprises a complementarity-determining region light chain 1 (CDR-L1) of SEQ ID NO: 957, CDR-L2 of SEQ ID NO: 1499, and CDR-L3 of SEQ ID NO: 2041. In some embodiments, the variable heavy chain comprises a polypeptide consensus sequence having at least 95% sequence identity to the amino acid sequence of SEQ ID NO: 144, and the variable light chain comprises a polypeptide consensus sequence having at least 95% sequence identity to the amino acid sequence of SEQ ID NO: 415. In some embodiments, the antibody or antigen binding fragment thereof binds a human ANXA1, mouse ANXA1, rat ANXA1, bovine ANXA1, or cynomolgus monkey ANXA1. In some embodiments, the human ANXA1 comprises a sequence of SEQ ID NO: 4435.

[0247] Provided herein is an antibody that competes with an antibody or antigen binding fragment of any one of claims 627-630 for binding to ANXA1, wherein the antibody binds to human ANXA1 or mouse ANXA1.

[0248] Provided herein is an antibody or an antigen binding fragment thereof that selectively binds to zinc finger protein 287, transcript variant 2 (ZNF287) or a variant thereof, comprising at least one of: a variable heavy chain region, wherein the variable heavy chain region comprises a complementarity-determining region heavy chain 1 (CDR-H1) of SEQ ID NO: 690, CDR-H2 of SEQ ID NO: 1232, and CDR-H3 of SEQ ID NO: 1774; and/or a variable light chain region, wherein the variable light chain region comprises a complementarity-determining region light chain 1 (CDR-L1) of SEQ ID NO: 961, CDR-L2 of SEQ ID NO: 1503, and CDR-L3 of SEQ ID NO: 2045. In some embodiments, the variable heavy chain comprises a polypeptide consensus sequence having at least 95% sequence identity to the amino acid sequence of SEQ ID NO: 148, and the variable light chain comprises a polypeptide consensus sequence having at least 95% sequence identity to the amino acid sequence of SEQ ID NO: 419. In some embodiments, the antibody or antigen binding fragment thereof binds a human ZNF287, mouse ZNF287, rat ZNF287, bovine ZNF287, or cynomolgus monkey ZNF287. In some embodiments, the human ZNF287 comprises a sequence of SEQ ID NO: 4436.

[0249] Provided herein is an antibody that competes with an antibody or antigen binding fragment of any one of claims 632-635 for binding to ZNF287, wherein the antibody binds to human ZNF287 or mouse ZNF287.

[0250] Provided herein is an antibody or an antigen binding fragment thereof that selectively binds to family with sequence similarity 177 member A1, transcript variant 2 (FAM177A1) or a variant thereof, comprising at least one of: a variable heavy chain region, wherein the variable heavy chain region comprises a complementarity-determining region heavy chain 1 (CDR-H1) of SEQ ID NO: 698, CDR-H2 of SEQ ID NO: 1240, and CDR-H3 of SEQ ID NO: 1782; and/or a variable light chain region, wherein the variable light chain region comprises a complementarity-determining region light chain 1 (CDR-L1) of SEQ ID NO: 969, CDR-L2 of SEQ ID NO: 1511, and CDR-L3 of SEQ ID NO: 2053. In some embodiments, the variable heavy chain comprises a polypeptide consensus sequence having at least 95% sequence identity to the amino acid sequence of SEQ ID NO: 156, and the variable light chain comprises a polypeptide consensus sequence having at least 95% sequence identity to the amino acid sequence of SEQ ID NO: 427. In some embodiments, the antibody or antigen binding fragment thereof binds a human FAM177A1, mouse FAM177A1, rat FAM177A1, bovine FAM177A1, or cynomolgus monkey FAM177A1. In some embodiments, the human FAM177A1 comprises a sequence of SEQ ID NO: 4437.

[0251] Provided herein is an antibody that competes with an antibody or antigen binding fragment of any one of claims 637-640 for binding to FAM177A1, wherein the antibody binds to human FAM177A1 or mouse FAM177A1.

[0252] Provided herein is an antibody or an antigen binding fragment thereof that selectively binds to quinoid dihydropteridine reductase, transcript variant 1 (QDPR) or a variant thereof, comprising at least one of: a variable heavy chain region, wherein the variable heavy chain region comprises a complementarity-determining region heavy chain 1 (CDR-H1) of SEQ ID NO: 701, CDR-H2 of SEQ ID NO: 1243, and CDR-H3 of SEQ ID NO: 1785; and/or a variable light chain region, wherein the variable light chain region comprises a complementarity-determining region light chain 1 (CDR-L1) of SEQ ID NO: 972, CDR-L2 of SEQ ID NO: 1514, and CDR-L3 of SEQ ID NO: 2056. In some embodiments, the variable heavy chain comprises a polypeptide consensus sequence having at least 95% sequence identity to the amino acid sequence of SEQ ID NO: 159, and the variable light chain comprises a polypeptide consensus sequence having at least 95% sequence identity to the amino acid sequence of SEQ ID NO: 430. In some embodiments, the antibody or antigen binding fragment thereof binds a human QDPR, mouse QDPR, rat QDPR, bovine QDPR, or cynomolgus monkey QDPR. In some embodiments, the human QDPR comprises a sequence of SEQ ID NO: 4438.

[0253] Provided herein is an antibody that competes with an antibody or antigen binding fragment of any one of claims 642-645 for binding to QDPR, wherein the antibody binds to human QDPR or mouse QDPR.

[0254] Provided herein is an antibody or an antigen binding fragment thereof that selectively binds to ELK2, member of ETS oncogene family, pseudogene 1 (BC031259.1_frag) or a variant thereof, comprising at least one of: a variable heavy chain region, wherein the variable heavy chain region comprises a complementarity-determining region heavy chain 1 (CDR-H1) of SEQ ID NO: 703, CDR-H2 of SEQ ID NO: 1245, and CDR-H3 of SEQ ID NO: 1787; and/or a variable light chain region, wherein the variable light chain region comprises a complementarity-determining region light chain 1 (CDR-L1) of SEQ ID NO: 974, CDR-L2 of SEQ ID NO: 1516, and CDR-L3 of SEQ ID NO: 2058. In some embodiments, the variable heavy chain comprises a polypeptide consensus sequence having at least 95% sequence identity to the amino acid sequence of SEQ ID NO: 161, and the variable light chain comprises a polypeptide consensus sequence having at least 95% sequence identity to the amino acid sequence of SEQ ID NO: 432. In some embodiments, the antibody or antigen binding fragment thereof binds a human BC031259.1_frag, mouse BC031259.1frag, rat BC031259.1_frag, bovine BC031259.1_frag, or cynomolgus monkey BC031259.1_frag. In some embodiments, the human BC031259.1_frag comprises a sequence of SEQ ID NO: 4439.

[0255] Provided herein is an antibody that competes with an antibody or antigen binding fragment of any one of claims 647-650 for binding to BC031259.1_frag, wherein the antibody binds to human BC031259.1_frag or mouse BC031259.1_frag.

[0256] Provided herein is an antibody or an antigen binding fragment thereof that selectively binds to methyltransferase like 21C (METTL21C) or a variant thereof, comprising at least one of: a variable heavy chain region, wherein the variable heavy chain region comprises a complementarity-determining region heavy chain 1 (CDR-H1) of SEQ ID NO: 703, CDR-H2 of SEQ ID NO: 1245, and CDR-H3 of SEQ ID NO: 1787; and/or a variable light chain region, wherein the variable light chain region comprises a complementarity-determining region light chain 1 (CDR-L1) of SEQ ID NO: 974, CDR-L2 of SEQ ID NO: 1516, and CDR-L3 of SEQ ID NO: 2058. In some embodiments, the variable heavy chain comprises a polypeptide consensus sequence having at least 95% sequence identity to the amino acid sequence of SEQ ID NO: 161, and the variable light chain comprises a polypeptide consensus sequence having at least 95% sequence identity to the amino acid sequence of SEQ ID NO: 432. In some embodiments, the antibody or antigen binding fragment thereof binds a human METTL21C, mouse METTL21C, rat METTL21C, bovine METTL21C, or cynomolgus monkey METTL21C. In some embodiments, the human METTL21C comprises a sequence of SEQ ID NO: 4440.

[0257] Provided herein is an antibody that competes with an antibody or antigen binding fragment of any one of claims 652-655 for binding to METTL21C, wherein the antibody binds to human METTL21C or mouse METTL21C.

[0258] Provided herein is an antibody or an antigen binding fragment thereof that selectively binds to hydroxymethylbilane synthase, transcript variant X3 (IAMBS) or a variant thereof, comprising at least one of: a variable heavy chain region, wherein the variable heavy chain region comprises a complementarity-determining region heavy chain 1 (CDR-H1) of SEQ ID NO: 706, CDR-H2 of SEQ ID NO: 1248, and CDR-H3 of SEQ ID NO: 1790; and/or a variable light chain region, wherein the variable light chain region comprises a complementarity-determining region light chain 1 (CDR-L1) of SEQ ID NO: 977, CDR-L2 of SEQ ID NO: 1519, and CDR-L3 of SEQ ID NO: 2061. In some embodiments, the variable heavy chain comprises a polypeptide consensus sequence having at least 95% sequence identity to the amino acid sequence of SEQ ID NO: 164, and the variable light chain comprises a polypeptide consensus sequence having at least 95% sequence identity to the amino acid sequence of SEQ ID NO: 435. In some embodiments, the antibody or antigen binding fragment thereof binds a human HMBS, mouse HMBS, rat HMBS, bovine HMBS, or cynomolgus monkey HMBS. In some embodiments, the human HMBS comprises a sequence of SEQ ID NO: 4441.

[0259] Provided herein is an antibody that competes with an antibody or antigen binding fragment of any one of claims 657-660 for binding to HMBS, wherein the antibody binds to human HMBS or mouse HMBS.

[0260] Provided herein is an antibody or an antigen binding fragment thereof that selectively binds to hook microtubule tethering protein 2, transcript variant 2 (HOOK2) or a variant thereof, comprising at least one of: a variable heavy chain region, wherein the variable heavy chain region comprises a complementarity-determining region heavy chain 1 (CDR-H1) of SEQ ID NO: 706, CDR-H2 of SEQ ID NO: 1248, and CDR-H3 of SEQ ID NO: 1790; and/or a variable light chain region, wherein the variable light chain region comprises a complementarity-determining region light chain 1 (CDR-L1) of SEQ ID NO: 977, CDR-L2 of SEQ ID NO: 1519, and CDR-L3 of SEQ ID NO: 2061. In some embodiments, the variable heavy chain comprises a polypeptide consensus sequence having at least 95% sequence identity to the amino acid sequence of SEQ ID NO: 164, and the variable light chain comprises a polypeptide consensus sequence having at least 95% sequence identity to the amino acid sequence of SEQ ID NO: 435. In some embodiments, the antibody or antigen binding fragment thereof binds a human HOOK2, mouse HOOK2, rat HOOK2, bovine HOOK2, or cynomolgus monkey HOOK2. In some embodiments, the human HOOK2 comprises a sequence of SEQ ID NO: 4442.

[0261] Provided herein is an antibody that competes with an antibody or antigen binding fragment of any one of claims 662-665 for binding to HOOK2, wherein the antibody binds to human HOOK2 or mouse HOOK2.

[0262] Provided herein is an antibody or an antigen binding fragment thereof that selectively binds to Magel2 (Q6ir13_frag) or a variant thereof, comprising at least one of:

[0263] a variable heavy chain region, wherein the variable heavy chain region comprises a complementarity-determining region heavy chain 1 (CDR-H1) of SEQ ID NO: 713, CDR-H2 of SEQ ID NO: 1255, and CDR-H3 of SEQ ID NO: 1797; and/or a variable light chain region, wherein the variable light chain region comprises a complementarity-determining region light chain 1 (CDR-L1) of SEQ ID NO: 984, CDR-L2 of SEQ ID NO: 1526, and CDR-L3 of SEQ ID NO: 2068. In some embodiments, the variable heavy chain comprises a polypeptide consensus sequence having at least 95% sequence identity to the amino acid sequence of SEQ ID NO: 171, and the variable light chain comprises a polypeptide consensus sequence having at least 95% sequence identity to the amino acid sequence of SEQ ID NO: 442. In some embodiments, the antibody or antigen binding fragment thereof binds a human Q6ir13_frag, mouse Q6ir13_frag, rat Q6ir13_frag, bovine Q6ir13_frag, or cynomolgus monkey Q6ir13_frag. In some embodiments, the human Q6ir13_frag comprises a sequence of SEQ ID NO: 4443.

[0264] Provided herein is an antibody that competes with an antibody or antigen binding fragment of any one of claims 667-670 for binding to Q6ir13_frag, wherein the antibody binds to human Q6ir13_frag or mouse Q6ir13_frag.

[0265] Provided herein is an antibody or an antigen binding fragment thereof that selectively binds to serine and arginine rich splicing factor 3, transcript variant 1 (SRSF3) or a variant thereof, comprising at least one of: a variable heavy chain region, wherein the variable heavy chain region comprises a complementarity-determining region heavy chain 1 (CDR-H1) of SEQ ID NO: 713, CDR-H2 of SEQ ID NO: 1255, and CDR-H3 of SEQ ID NO: 1797; and/or a variable light chain region, wherein the variable light chain region comprises a complementarity-determining region light chain 1 (CDR-L1) of SEQ ID NO: 984, CDR-L2 of SEQ ID NO: 1526, and CDR-L3 of SEQ ID NO: 2068. In some embodiments, the variable heavy chain comprises a polypeptide consensus sequence having at least 95% sequence identity to the amino acid sequence of SEQ ID NO: 171, and the variable light chain comprises a polypeptide consensus sequence having at least 95% sequence identity to the amino acid sequence of SEQ ID NO: 442. In some embodiments, the antibody or antigen binding fragment thereof binds a human SRSF3, mouse SRSF3, rat SRSF3, bovine SRSF3, or cynomolgus monkey SRSF3. In some embodiments, the human SRSF3 comprises a sequence of SEQ ID NO: 4444.

[0266] Provided herein is an antibody that competes with an antibody or antigen binding fragment of any one of claims 672-675 for binding to SRSF3, wherein the antibody binds to human SRSF3 or mouse SRSF3.

[0267] Provided herein is an antibody or an antigen binding fragment thereof that selectively binds to RAN binding protein 10, transcript variant 1 (RANBP10) or a variant thereof, comprising at least one of: a variable heavy chain region, wherein the variable heavy chain region comprises a complementarity-determining region heavy chain 1 (CDR-H1) of SEQ ID NO: 714, CDR-H2 of SEQ ID NO: 1256, and CDR-H3 of SEQ ID NO: 1798; and/or a variable light chain region, wherein the variable light chain region comprises a complementarity-determining region light chain 1 (CDR-L1) of SEQ ID NO: 985, CDR-L2 of SEQ ID NO: 1527, and CDR-L3 of SEQ ID NO: 2069. In some embodiments, the variable heavy chain comprises a polypeptide consensus sequence having at least 95% sequence identity to the amino acid sequence of SEQ ID NO: 172, and the variable light chain comprises a polypeptide consensus sequence having at least 95% sequence identity to the amino acid sequence of SEQ ID NO: 443. In some embodiments, the antibody or antigen binding fragment thereof binds a human RANBP10, mouse RANBP10, rat RANBP10, bovine RANBP10, or cynomolgus monkey RANBP10. In some embodiments, the human RANBP10 comprises a sequence of SEQ ID NO: 4445.

[0268] Provided herein is an antibody that competes with an antibody or antigen binding fragment of any one of claims 677-680 for binding to RANBP10, wherein the antibody binds to human RANBP10 or mouse RANBP10.

[0269] Provided herein is an antibody or an antigen binding fragment thereof that selectively binds to Wnt family member 9b (WNT9B) or a variant thereof, comprising at least one of: a variable heavy chain region, wherein the variable heavy chain region comprises a complementarity-determining region heavy chain 1 (CDR-H1) of SEQ ID NO: 714, CDR-H2 of SEQ ID NO: 1256, and CDR-H3 of SEQ ID NO: 1798; and/or a variable light chain region, wherein the variable light chain region comprises a complementarity-determining region light chain 1 (CDR-L1) of SEQ ID NO: 985, CDR-L2 of SEQ ID NO: 1527, and CDR-L3 of SEQ ID NO: 2069. In some embodiments, the variable heavy chain comprises a polypeptide consensus sequence having at least 95% sequence identity to the amino acid sequence of SEQ ID NO: 172, and the variable light chain comprises a polypeptide consensus sequence having at least 95% sequence identity to the amino acid sequence of SEQ ID NO: 443. In some embodiments, the antibody or antigen binding fragment thereof binds a human WNT9B, mouse WNT9B, rat WNT9B, bovine WNT9B, or cynomolgus monkey WNT9B. In some embodiments, the human WNT9B comprises a sequence of SEQ ID NO: 4446.

[0270] Provided herein is an antibody that competes with an antibody or antigen binding fragment of any one of claims 682-685 for binding to WNT9B, wherein the antibody binds to human WNT9B or mouse WNT9B.

[0271] Provided herein is an antibody or an antigen binding fragment thereof that selectively binds to ubiquilin 2 (UBQLN2) or a variant thereof, comprising at least one of: a variable heavy chain region, wherein the variable heavy chain region comprises a complementarity-determining region heavy chain 1 (CDR-H1) of SEQ ID NO: 715, CDR-H2 of SEQ ID NO: 1257, and CDR-H3 of SEQ ID NO: 1799; and/or a variable light chain region, wherein the variable light chain region comprises a complementarity-determining region light chain 1 (CDR-L1) of SEQ ID NO: 986, CDR-L2 of SEQ ID NO: 1528, and CDR-L3 of SEQ ID NO: 2070. In some embodiments, the variable heavy chain comprises a polypeptide consensus sequence having at least 95% sequence identity to the amino acid sequence of SEQ ID NO: 173, and the variable light chain comprises a polypeptide consensus sequence having at least 95% sequence identity to the amino acid sequence of SEQ ID NO: 444. In some embodiments, the antibody or antigen binding fragment thereof binds a human UBQLN2, mouse UBQLN2, rat UBQLN2, bovine UBQLN2, or cynomolgus monkey UBQLN2. In some embodiments, the human UBQLN2 comprises a sequence of SEQ ID NO: 4447.

[0272] Provided herein is an antibody that competes with an antibody or antigen binding fragment of any one of claims 687-690 for binding to UBQLN2, wherein the antibody binds to human UBQLN2 or mouse UBQLN2.

[0273] Provided herein is an antibody or an antigen binding fragment thereof that selectively binds to ubiquilin 1, transcript variant 2 (UBQLN1) or a variant thereof, comprising at least one of: a variable heavy chain region, wherein the variable heavy chain region comprises a complementarity-determining region heavy chain 1 (CDR-H1) of SEQ ID NO: 715, CDR-H2 of SEQ ID NO: 1257, and CDR-H3 of SEQ ID NO: 1799; and/or a variable light chain region, wherein the variable light chain region comprises a complementarity-determining region light chain 1 (CDR-L1) of SEQ ID NO: 986, CDR-L2 of SEQ ID NO: 1528, and CDR-L3 of SEQ ID NO: 2070. In some embodiments, the variable heavy chain comprises a polypeptide consensus sequence having at least 95% sequence identity to the amino acid sequence of SEQ ID NO: 173, and the variable light chain comprises a polypeptide consensus sequence having at least 95% sequence identity to the amino acid sequence of SEQ ID NO: 444. In some embodiments, the antibody or antigen binding fragment thereof binds a human UBQLN1, mouse UBQLN1, rat UBQLN1, bovine UBQLN1, or cynomolgus monkey UBQLN1. In some embodiments, the human UBQLN1 comprises a sequence of SEQ ID NO: 4370.

[0274] Provided herein is an antibody that competes with an antibody or antigen binding fragment of any one of claims 692-695 for binding to UBQLN1, wherein the antibody binds to human UBQLN1 or mouse UBQLN1.

[0275] Provided herein is an antibody or an antigen binding fragment thereof that selectively binds to Ubiquilin 3 (UBQLN3) or a variant thereof, comprising at least one of: a variable heavy chain region, wherein the variable heavy chain region comprises a complementarity-determining region heavy chain 1 (CDR-H1) of SEQ ID NO: 715, CDR-H2 of SEQ ID NO: 1257, and CDR-H3 of SEQ ID NO: 1799; and/or a variable light chain region, wherein the variable light chain region comprises a complementarity-determining region light chain 1 (CDR-L1) of SEQ ID NO: 986, CDR-L2 of SEQ ID NO: 1528, and CDR-L3 of SEQ ID NO: 2070. In some embodiments, the variable heavy chain comprises a polypeptide consensus sequence having at least 95% sequence identity to the amino acid sequence of SEQ ID NO: 173, and the variable light chain comprises a polypeptide consensus sequence having at least 95% sequence identity to the amino acid sequence of SEQ ID NO: 444. In some embodiments, the antibody or antigen binding fragment thereof binds a human UBQLN3, mouse UBQLN3, rat UBQLN3, bovine UBQLN3, or cynomolgus monkey UBQLN3. In some embodiments, the human UBQLN3 comprises a sequence of SEQ ID NO: 4448.

[0276] Provided herein is an antibody that competes with an antibody or antigen binding fragment of any one of claims 697-700 for binding to UBQLN3, wherein the antibody binds to human UBQLN3 or mouse UBQLN3.

[0277] Provided herein is an antibody or an antigen binding fragment thereof that selectively binds to anterior gradient 3, protein disulphide isomerase family member (AGR3) or a variant thereof, comprising at least one of: a variable heavy chain region, wherein the variable heavy chain region comprises a complementarity-determining region heavy chain 1 (CDR-H1) of SEQ ID NO: 717, CDR-H2 of SEQ ID NO: 1259, and CDR-H3 of SEQ ID NO: 1801; and/or a variable light chain region, wherein the variable light chain region comprises a complementarity-determining region light chain 1 (CDR-L1) of SEQ ID NO: 988, CDR-L2 of SEQ ID NO: 1530, and CDR-L3 of SEQ ID NO: 2072. In some embodiments, the variable heavy chain comprises a polypeptide consensus sequence having at least 95% sequence identity to the amino acid sequence of SEQ ID NO: 175, and the variable light chain comprises a polypeptide consensus sequence having at least 95% sequence identity to the amino acid sequence of SEQ ID NO: 446. In some embodiments, the antibody or antigen binding fragment thereof binds a human AGR3, mouse AGR3, rat AGR3, bovine AGR3, or cynomolgus monkey AGR3. In some embodiments, the human AGR3 comprises a sequence of SEQ ID NO: 4449.

[0278] Provided herein is an antibody that competes with an antibody or antigen binding fragment of any one of claims 702-705 for binding to AGR3, wherein the antibody binds to human AGR3 or mouse AGR3.

[0279] Provided herein is an antibody or an antigen binding fragment thereof that selectively binds to serine and arginine rich splicing factor 3, transcript variant 1 (SRSF3) or a variant thereof, comprising at least one of: a variable heavy chain region, wherein the variable heavy chain region comprises a complementarity-determining region heavy chain 1 (CDR-H1) of SEQ ID NO: 719, CDR-H2 of SEQ ID NO: 1261, and CDR-H3 of SEQ ID NO: 1803; and/or a variable light chain region, wherein the variable light chain region comprises a complementarity-determining region light chain 1 (CDR-L1) of SEQ ID NO: 990, CDR-L2 of SEQ ID NO: 1532, and CDR-L3 of SEQ ID NO: 2074. In some embodiments, the variable heavy chain comprises a polypeptide consensus sequence having at least 95% sequence identity to the amino acid sequence of SEQ ID NO: 177, and the variable light chain comprises a polypeptide consensus sequence having at least 95% sequence identity to the amino acid sequence of SEQ ID NO: 448. In some embodiments, the antibody or antigen binding fragment thereof binds a human SRSF3, mouse SRSF3, rat SRSF3, bovine SRSF3, or cynomolgus monkey SRSF3. In some embodiments, the human SRSF3 comprises a sequence of SEQ ID NO: 4444.

[0280] Provided herein is an antibody that competes with an antibody or antigen binding fragment of any one of claims 707-710 for binding to SRSF3, wherein the antibody binds to human SRSF3 or mouse SRSF3.

[0281] Provided herein is an antibody or an antigen binding fragment thereof that selectively binds to baculoviral IAP repeat containing 7, transcript variant 1 (BIRC7) or a variant thereof, comprising at least one of: a variable heavy chain region, wherein the variable heavy chain region comprises a complementarity-determining region heavy chain 1 (CDR-H1) of SEQ ID NO: 720, CDR-H2 of SEQ ID NO: 1262, and CDR-H3 of SEQ ID NO: 1804; and/or a variable light chain region, wherein the variable light chain region comprises a complementarity-determining region light chain 1 (CDR-L1) of SEQ ID NO: 991, CDR-L2 of SEQ ID NO: 1533, and CDR-L3 of SEQ ID NO: 2075. In some embodiments, the variable heavy chain comprises a polypeptide consensus sequence having at least 95% sequence identity to the amino acid sequence of SEQ ID NO: 178, and the variable light chain comprises a polypeptide consensus sequence having at least 95% sequence identity to the amino acid sequence of SEQ ID NO: 449. In some embodiments, the antibody or antigen binding fragment thereof binds a human BIRC7, mouse BIRC7, rat BIRC7, bovine BIRC7, or cynomolgus monkey BIRC7. In some embodiments, the human BIRC7 comprises a sequence of SEQ ID NO: 4450.

[0282] Provided herein is an antibody that competes with an antibody or antigen binding fragment of any one of claims 712-715 for binding to BIRC7, wherein the antibody binds to human BIRC7 or mouse BIRC7.

[0283] Provided herein is an antibody or an antigen binding fragment thereof that selectively binds to endosome associated trafficking regulator 1, transcript variant 2 (SDCCAG3) or a variant thereof, comprising at least one of: a variable heavy chain region, wherein the variable heavy chain region comprises a complementarity-determining region heavy chain 1 (CDR-H1) of SEQ ID NO: 722, CDR-H2 of SEQ ID NO: 1264, and CDR-H3 of SEQ ID NO: 1806; and/or a variable light chain region, wherein the variable light chain region comprises a complementarity-determining region light chain 1 (CDR-L1) of SEQ ID NO: 993, CDR-L2 of SEQ ID NO: 1535, and CDR-L3 of SEQ ID NO: 2077. In some embodiments, the variable heavy chain comprises a polypeptide consensus sequence having at least 95% sequence identity to the amino acid sequence of SEQ ID NO: 180, and the variable light chain comprises a polypeptide consensus sequence having at least 95% sequence identity to the amino acid sequence of SEQ ID NO: 451. In some embodiments, the antibody or antigen binding fragment thereof binds a human SDCCAG3, mouse SDCCAG3, rat SDCCAG3, bovine SDCCAG3, or cynomolgus monkey SDCCAG3. In some embodiments, the human SDCCAG3 comprises a sequence of SEQ ID NO: 4373.

[0284] Provided herein is an antibody that competes with an antibody or antigen binding fragment of any one of claims 717-720 for binding to SDCCAG3, wherein the antibody binds to human SDCCAG3 or mouse SDCCAG3.

[0285] Provided herein is an antibody or an antigen binding fragment thereof that selectively binds to microtubule associated scaffold protein 2, transcript variant 2 (MTUS2) or a variant thereof, comprising at least one of: a variable heavy chain region, wherein the variable heavy chain region comprises a complementarity-determining region heavy chain 1 (CDR-H1) of SEQ ID NO: 724, CDR-H2 of SEQ ID NO: 1266, and CDR-H3 of SEQ ID NO: 1808; and/or a variable light chain region, wherein the variable light chain region comprises a complementarity-determining region light chain 1 (CDR-L1) of SEQ ID NO: 995, CDR-L2 of SEQ ID NO: 1537, and CDR-L3 of SEQ ID NO: 2079. In some embodiments, the variable heavy chain comprises a polypeptide consensus sequence having at least 95% sequence identity to the amino acid sequence of SEQ ID NO: 182, and the variable light chain comprises a polypeptide consensus sequence having at least 95% sequence identity to the amino acid sequence of SEQ ID NO: 453. In some embodiments, the antibody or antigen binding fragment thereof binds a human MTUS2, mouse MTUS2, rat MTUS2, bovine MTUS2, or cynomolgus monkey MTUS2. In some embodiments, the human MTUS2 comprises a sequence of SEQ ID NO: 4451.

[0286] Provided herein is an antibody that competes with an antibody or antigen binding fragment of any one of claims 722-725 for binding to MTUS2, wherein the antibody binds to human MTUS2 or mouse MTUS2.

[0287] Provided herein is an antibody or an antigen binding fragment thereof that selectively binds to zinc finger protein 296 (ZNF296) or a variant thereof, comprising at least one of: a variable heavy chain region, wherein the variable heavy chain region comprises a complementarity-determining region heavy chain 1 (CDR-H1) of SEQ ID NO: 725, CDR-H2 of SEQ ID NO: 1267, and CDR-H3 of SEQ ID NO: 1809; and/or a variable light chain region, wherein the variable light chain region comprises a complementarity-determining region light chain 1 (CDR-L1) of SEQ ID NO: 996, CDR-L2 of SEQ ID NO: 1538, and CDR-L3 of SEQ ID NO: 2080. In some embodiments, the variable heavy chain comprises a polypeptide consensus sequence having at least 95% sequence identity to the amino acid sequence of SEQ ID NO: 183, and the variable light chain comprises a polypeptide consensus sequence having at least 95% sequence identity to the amino acid sequence of SEQ ID NO: 454. In some embodiments, the antibody or antigen binding fragment thereof binds a human ZNF296, mouse ZNF296, rat ZNF296, bovine ZNF296, or cynomolgus monkey ZNF296. In some embodiments, the human ZNF296 comprises a sequence of SEQ ID NO: 4452.

[0288] Provided herein is an antibody that competes with an antibody or antigen binding fragment of any one of claims 727-730 for binding to ZNF296, wherein the antibody binds to human ZNF296 or mouse ZNF296.

[0289] Provided herein is an antibody or an antigen binding fragment thereof that selectively binds to phosphodiesterase 5A, transcript variant 1 (PDE5A) or a variant thereof, comprising at least one of: a variable heavy chain region, wherein the variable heavy chain region comprises a complementarity-determining region heavy chain 1 (CDR-H1) of SEQ ID NO: 725, CDR-H2 of SEQ ID NO: 1267, and CDR-H3 of SEQ ID NO: 1809; and/or a variable light chain region, wherein the variable light chain region comprises a complementarity-determining region light chain 1 (CDR-L1) of SEQ ID NO: 996, CDR-L2 of SEQ ID NO: 1538, and CDR-L3 of SEQ ID NO: 2080. In some embodiments, the variable heavy chain comprises a polypeptide consensus sequence having at least 95% sequence identity to the amino acid sequence of SEQ ID NO: 183, and the variable light chain comprises a polypeptide consensus sequence having at least 95% sequence identity to the amino acid sequence of SEQ ID NO: 454. In some embodiments, the antibody or antigen binding fragment thereof binds a human PDE5A, mouse PDE5A, rat PDE5A, bovine PDE5A, or cynomolgus monkey PDE5A. In some embodiments, the human PDE5A comprises a sequence of SEQ ID NO: 4453.

[0290] Provided herein is an antibody that competes with an antibody or antigen binding fragment of any one of claims 732-735 for binding to PDE5A, wherein the antibody binds to human PDE5A or mouse PDE5A.

[0291] Provided herein is an antibody or an antigen binding fragment thereof that selectively binds to Ep400 pseudogene 1 (EP400NL) or a variant thereof, comprising at least one of: a variable heavy chain region, wherein the variable heavy chain region comprises a complementarity-determining region heavy chain 1 (CDR-H1) of SEQ ID NO: 725, CDR-H2 of SEQ ID NO: 1267, and CDR-H3 of SEQ ID NO: 1809; and/or a variable light chain region, wherein the variable light chain region comprises a complementarity-determining region light chain 1 (CDR-L1) of SEQ ID NO: 996, CDR-L2 of SEQ ID NO: 1538, and CDR-L3 of SEQ ID NO: 2080. In some embodiments, the variable heavy chain comprises a polypeptide consensus sequence having at least 95% sequence identity to the amino acid sequence of SEQ ID NO: 183, and the variable light chain comprises a polypeptide consensus sequence having at least 95% sequence identity to the amino acid sequence of SEQ ID NO: 454. In some embodiments, the antibody or antigen binding fragment thereof binds a human EP400NL, mouse EP400NL, rat EP400NL, bovine EP400NL, or cynomolgus monkey EP400NL. In some embodiments, the human EP400NL comprises a sequence of SEQ ID NO: 4454.

[0292] Provided herein is an antibody that competes with an antibody or antigen binding fragment of any one of claims 737-740 for binding to EP400NL, wherein the antibody binds to human EP400NL or mouse EP400NL.

[0293] Provided herein is an antibody or an antigen binding fragment thereof that selectively binds to Bcl2 like 1 (BCL2L1) or a variant thereof, comprising at least one of: a variable heavy chain region, wherein the variable heavy chain region comprises a complementarity-determining region heavy chain 1 (CDR-H1) of SEQ ID NO: 727, CDR-H2 of SEQ ID NO: 1269, and CDR-H3 of SEQ ID NO: 1811; and/or a variable light chain region, wherein the variable light chain region comprises a complementarity-determining region light chain 1 (CDR-L1) of SEQ ID NO: 998, CDR-L2 of SEQ ID NO: 1540, and CDR-L3 of SEQ ID NO: 2082. In some embodiments, the variable heavy chain comprises a polypeptide consensus sequence having at least 95% sequence identity to the amino acid sequence of SEQ ID NO: 185, and the variable light chain comprises a polypeptide consensus sequence having at least 95% sequence identity to the amino acid sequence of SEQ ID NO: 456. In some embodiments, the antibody or antigen binding fragment thereof binds a human BCL2L1, mouse BCL2L1, rat BCL2L1, bovine BCL2L1, or cynomolgus monkey BCL2L1. In some embodiments, the human BCL2L1 comprises a sequence of SEQ ID NO: 4455.

[0294] Provided herein is an antibody that competes with an antibody or antigen binding fragment of any one of claims 742-745 for binding to BCL2L1, wherein the antibody binds to human BCL2L1 or mouse BCL2L1.

[0295] Provided herein is an antibody or an antigen binding fragment thereof that selectively binds to arginine and glutamate rich 1 (ARGLU1) or a variant thereof, comprising at least one of: a variable heavy chain region, wherein the variable heavy chain region comprises a complementarity-determining region heavy chain 1 (CDR-H1) of SEQ ID NO: 728, CDR-H2 of SEQ ID NO: 1270, and CDR-H3 of SEQ ID NO: 1812; and/or a variable light chain region, wherein the variable light chain region comprises a complementarity-determining region light chain 1 (CDR-L1) of SEQ ID NO: 999, CDR-L2 of SEQ ID NO: 1541, and CDR-L3 of SEQ ID NO: 2083. In some embodiments, the variable heavy chain comprises a polypeptide consensus sequence having at least 95% sequence identity to the amino acid sequence of SEQ ID NO: 186, and the variable light chain comprises a polypeptide consensus sequence having at least 95% sequence identity to the amino acid sequence of SEQ ID NO: 457. In some embodiments, the antibody or antigen binding fragment thereof binds a human ARGLU1, mouse ARGLU1, rat ARGLU1, bovine ARGLU1, or cynomolgus monkey ARGLU1. In some embodiments, the human ARGLU1 comprises a sequence of SEQ ID NO: 4456.

[0296] Provided herein is an antibody that competes with an antibody or antigen binding fragment of any one of claims 747-750 for binding to ARGLU1, wherein the antibody binds to human ARGLU1 or mouse ARGLU1.

[0297] Provided herein is an antibody or an antigen binding fragment thereof that selectively binds to SAS-6 centriolar assembly protein, transcript variant 2 (SASS6) or a variant thereof, comprising at least one of: a variable heavy chain region, wherein the variable heavy chain region comprises a complementarity-determining region heavy chain 1 (CDR-H1) of SEQ ID NO: 728, CDR-H2 of SEQ ID NO: 1270, and CDR-H3 of SEQ ID NO: 1812; and/or a variable light chain region, wherein the variable light chain region comprises a complementarity-determining region light chain 1 (CDR-L1) of SEQ ID NO: 999, CDR-L2 of SEQ ID NO: 1541, and CDR-L3 of SEQ ID NO: 2083. In some embodiments, the variable heavy chain comprises a polypeptide consensus sequence having at least 95% sequence identity to the amino acid sequence of SEQ ID NO: 186, and the variable light chain comprises a polypeptide consensus sequence having at least 95% sequence identity to the amino acid sequence of SEQ ID NO: 457. In some embodiments, the antibody or antigen binding fragment thereof binds a human SASS6, mouse SASS6, rat SASS6, bovine SASS6, or cynomolgus monkey SASS6. In some embodiments, the human SASS6 comprises a sequence of SEQ ID NO: 4457.

[0298] Provided herein is an antibody that competes with an antibody or antigen binding fragment of any one of claims 752-755 for binding to SASS6, wherein the antibody binds to human SASS6 or mouse SASS6.

[0299] Provided herein is an antibody or an antigen binding fragment thereof that selectively binds to proteasome 26S subunit, non-ATPase 4, transcript variant 2 (PSMD4) or a variant thereof, comprising at least one of: a variable heavy chain region, wherein the variable heavy chain region comprises a complementarity-determining region heavy chain 1 (CDR-H1) of SEQ ID NO: 729, CDR-H2 of SEQ ID NO: 1271, and CDR-H3 of SEQ ID NO: 1813; and/or a variable light chain region, wherein the variable light chain region comprises a complementarity-determining region light chain 1 (CDR-L1) of SEQ ID NO: 1000, CDR-L2 of SEQ ID NO: 1542, and CDR-L3 of SEQ ID NO: 2084. In some embodiments, the variable heavy chain comprises a polypeptide consensus sequence having at least 95% sequence identity to the amino acid sequence of SEQ ID NO: 187, and the variable light chain comprises a polypeptide consensus sequence having at least 95% sequence identity to the amino acid sequence of SEQ ID NO: 458. In some embodiments, the antibody or antigen binding fragment thereof binds a human PSMD4, mouse PSMD4, rat PSMD4, bovine PSMD4, or cynomolgus monkey PSMD4. In some embodiments, the human PSMD4 comprises a sequence of SEQ ID NO: 4458.

[0300] Provided herein is an antibody that competes with an antibody or antigen binding fragment of any one of claims 757-760 for binding to PSMD4, wherein the antibody binds to human PSMD4 or mouse PSMD4.

[0301] Provided herein is an antibody or an antigen binding fragment thereof that selectively binds to Src like adaptor, transcript variant 1 (SLA) or a variant thereof, comprising at least one of: a variable heavy chain region, wherein the variable heavy chain region comprises a complementarity-determining region heavy chain 1 (CDR-H1) of SEQ ID NO: 729, CDR-H2 of SEQ ID NO: 1271, and CDR-H3 of SEQ ID NO: 1813; and/or a variable light chain region, wherein the variable light chain region comprises a complementarity-determining region light chain 1 (CDR-L1) of SEQ ID NO: 1000, CDR-L2 of SEQ ID NO: 1542, and CDR-L3 of SEQ ID NO: 2084. In some embodiments, the variable heavy chain comprises a polypeptide consensus sequence having at least 95% sequence identity to the amino acid sequence of SEQ ID NO: 187, and the variable light chain comprises a polypeptide consensus sequence having at least 95% sequence identity to the amino acid sequence of SEQ ID NO: 458. In some embodiments, the antibody or antigen binding fragment thereof binds a human SLA, mouse SLA, rat SLA, bovine SLA, or cynomolgus monkey SLA. In some embodiments, the human SLA comprises a sequence of SEQ ID NO: 4459.

[0302] Provided herein is an antibody that competes with an antibody or antigen binding fragment of any one of claims 762-765 for binding to SLA, wherein the antibody binds to human SLA or mouse SLA.

[0303] Provided herein is an antibody or an antigen binding fragment thereof that selectively binds to nudix hydrolase 21 (NUDT21) or a variant thereof, comprising at least one of: a variable heavy chain region, wherein the variable heavy chain region comprises a complementarity-determining region heavy chain 1 (CDR-H1) of SEQ ID NO: 730, CDR-H2 of SEQ ID NO: 1272, and CDR-H3 of SEQ ID NO: 1814; and/or a variable light chain region, wherein the variable light chain region comprises a complementarity-determining region light chain 1 (CDR-L1) of SEQ ID NO: 1001, CDR-L2 of SEQ ID NO: 1543, and CDR-L3 of SEQ ID NO: 2085. In some embodiments, the variable heavy chain comprises a polypeptide consensus sequence having at least 95% sequence identity to the amino acid sequence of SEQ ID NO: 188, and the variable light chain comprises a polypeptide consensus sequence having at least 95% sequence identity to the amino acid sequence of SEQ ID NO: 459. In some embodiments, the antibody or antigen binding fragment thereof binds a human NUDT21, mouse NUDT21, rat NUDT21, bovine NUDT21, or cynomolgus monkey NUDT21. In some embodiments, the human NUDT21 comprises a sequence of SEQ ID NO: 4460.

[0304] Provided herein is an antibody that competes with an antibody or antigen binding fragment of any one of claims 767-770 for binding to NUDT21, wherein the antibody binds to human NUDT21 or mouse NUDT21.

[0305] Provided herein is an antibody or an antigen binding fragment thereof that selectively binds to zinc finger protein 431, transcript variant 2 (ZNF431) or a variant thereof, comprising at least one of: a variable heavy chain region, wherein the variable heavy chain region comprises a complementarity-determining region heavy chain 1 (CDR-H1) of SEQ ID NO: 730, CDR-H2 of SEQ ID NO: 1272, and CDR-H3 of SEQ ID NO: 1814; and/or a variable light chain region, wherein the variable light chain region comprises a complementarity-determining region light chain 1 (CDR-L1) of SEQ ID NO: 1001, CDR-L2 of SEQ ID NO: 1543, and CDR-L3 of SEQ ID NO: 2085. In some embodiments, the variable heavy chain comprises a polypeptide consensus sequence having at least 95% sequence identity to the amino acid sequence of SEQ ID NO: 188, and the variable light chain comprises a polypeptide consensus sequence having at least 95% sequence identity to the amino acid sequence of SEQ ID NO: 459. In some embodiments, the antibody or antigen binding fragment thereof binds a human ZNF431, mouse ZNF431, rat ZNF431, bovine ZNF431, or cynomolgus monkey ZNF431. In some embodiments, the human ZNF431 comprises a sequence of SEQ ID NO: 4461.

[0306] Provided herein is an antibody that competes with an antibody or antigen binding fragment of any one of claims 772-775 for binding to ZNF431, wherein the antibody binds to human ZNF431 or mouse ZNF431.

[0307] Provided herein is an antibody or an antigen binding fragment thereof that selectively binds to Zinc finger protein 699 (ZNF699) or a variant thereof, comprising at least one of: a variable heavy chain region, wherein the variable heavy chain region comprises a complementarity-determining region heavy chain 1 (CDR-H1) of SEQ ID NO: 730, CDR-H2 of SEQ ID NO: 1272, and CDR-H3 of SEQ ID NO: 1814; and/or a variable light chain region, wherein the variable light chain region comprises a complementarity-determining region light chain 1 (CDR-L1) of SEQ ID NO: 1001, CDR-L2 of SEQ ID NO: 1543, and CDR-L3 of SEQ ID NO: 2085. In some embodiments, the variable heavy chain comprises a polypeptide consensus sequence having at least 95% sequence identity to the amino acid sequence of SEQ ID NO: 188, and the variable light chain comprises a polypeptide consensus sequence having at least 95% sequence identity to the amino acid sequence of SEQ ID NO: 459. In some embodiments, the antibody or antigen binding fragment thereof binds a human ZNF699, mouse ZNF699, rat ZNF699, bovine ZNF699, or cynomolgus monkey ZNF699. In some embodiments, the human ZNF699 comprises a sequence of SEQ ID NO: 4462.

[0308] Provided herein is an antibody that competes with an antibody or antigen binding fragment of any one of claims 777-780 for binding to ZNF699, wherein the antibody binds to human ZNF699 or mouse ZNF699.

[0309] Provided herein is an antibody or an antigen binding fragment thereof that selectively binds to quinoid dihydropteridine reductase, transcript variant 1 (QDPR) or a variant thereof, comprising at least one of: a variable heavy chain region, wherein the variable heavy chain region comprises a complementarity-determining region heavy chain 1 (CDR-H1) of SEQ ID NO: 731, CDR-H2 of SEQ ID NO: 1273, and CDR-H3 of SEQ ID NO: 1815; and/or a variable light chain region, wherein the variable light chain region comprises a complementarity-determining region light chain 1 (CDR-L1) of SEQ ID NO: 1002, CDR-L2 of SEQ ID NO: 1544, and CDR-L3 of SEQ ID NO: 2086. In some embodiments, the variable heavy chain comprises a polypeptide consensus sequence having at least 95% sequence identity to the amino acid sequence of SEQ ID NO: 189, and the variable light chain comprises a polypeptide consensus sequence having at least 95% sequence identity to the amino acid sequence of SEQ ID NO: 460. In some embodiments, the antibody or antigen binding fragment thereof binds a human QDPR, mouse QDPR, rat QDPR, bovine QDPR, or cynomolgus monkey QDPR. In some embodiments, the human QDPR comprises a sequence of SEQ ID NO: 4438.

[0310] Provided herein is an antibody that competes with an antibody or antigen binding fragment of any one of claims 782-785 for binding to QDPR, wherein the antibody binds to human QDPR or mouse QDPR.

[0311] Provided herein is an antibody or an antigen binding fragment thereof that selectively binds to PAGE family member 2 (PAGE2) or a variant thereof, comprising at least one of:

[0312] a variable heavy chain region, wherein the variable heavy chain region comprises a complementarity-determining region heavy chain 1 (CDR-H1) of SEQ ID NO: 732, CDR-H2 of SEQ ID NO: 1274, and CDR-H3 of SEQ ID NO: 1816; and/or a variable light chain region, wherein the variable light chain region comprises a complementarity-determining region light chain 1 (CDR-L1) of SEQ ID NO: 1003, CDR-L2 of SEQ ID NO: 1545, and CDR-L3 of SEQ ID NO: 2087. In some embodiments, the variable heavy chain comprises a polypeptide consensus sequence having at least 95% sequence identity to the amino acid sequence of SEQ ID NO: 190, and the variable light chain comprises a polypeptide consensus sequence having at least 95% sequence identity to the amino acid sequence of SEQ ID NO: 461. In some embodiments, the antibody or antigen binding fragment thereof binds a human PAGE2, mouse PAGE2, rat PAGE2, bovine PAGE2, or cynomolgus monkey PAGE2. In some embodiments, the human PAGE2 comprises a sequence of SEQ ID NO: 4463.

[0313] Provided herein is an antibody that competes with an antibody or antigen binding fragment of any one of claims 787-790 for binding to PAGE2, wherein the antibody binds to human PAGE2 or mouse PAGE2.

[0314] Provided herein is an antibody or an antigen binding fragment thereof that selectively binds to keratin associated protein 12-3 (KRTAP12-3) or a variant thereof, comprising at least one of: a variable heavy chain region, wherein the variable heavy chain region comprises a complementarity-determining region heavy chain 1 (CDR-H1) of SEQ ID NO: 732, CDR-H2 of SEQ ID NO: 1274, and CDR-H3 of SEQ ID NO: 1816; and/or a variable light chain region, wherein the variable light chain region comprises a complementarity-determining region light chain 1 (CDR-L1) of SEQ ID NO: 1003, CDR-L2 of SEQ ID NO: 1545, and CDR-L3 of SEQ ID NO: 2087. In some embodiments, the variable heavy chain comprises a polypeptide consensus sequence having at least 95% sequence identity to the amino acid sequence of SEQ ID NO: 190, and the variable light chain comprises a polypeptide consensus sequence having at least 95% sequence identity to the amino acid sequence of SEQ ID NO: 461. In some embodiments, the antibody or antigen binding fragment thereof binds a human KRTAP12-3, mouse KRTAP12-3, rat KRTAP12-3, bovine KRTAP12-3, or cynomolgus monkey KRTAP12-3. In some embodiments, the human KRTAP12-3 comprises a sequence of SEQ ID NO: 4464.

[0315] Provided herein is an antibody that competes with an antibody or antigen binding fragment of any one of claims 792-795 for binding to KRTAP12-3, wherein the antibody binds to human KRTAP12-3 or mouse KRTAP12-3.

[0316] Provided herein is an antibody or an antigen binding fragment thereof that selectively binds to enolase 2 (ENO2) or a variant thereof, comprising at least one of: a variable heavy chain region, wherein the variable heavy chain region comprises a complementarity-determining region heavy chain 1 (CDR-H1) of SEQ ID NO: 734, CDR-H2 of SEQ ID NO: 1276, and CDR-H3 of SEQ ID NO: 1818; and/or a variable light chain region, wherein the variable light chain region comprises a complementarity-determining region light chain 1 (CDR-L1) of SEQ ID NO: 1005, CDR-L2 of SEQ ID NO: 1547, and CDR-L3 of SEQ ID NO: 2089. In some embodiments, the variable heavy chain comprises a polypeptide consensus sequence having at least 95% sequence identity to the amino acid sequence of SEQ ID NO: 192, and the variable light chain comprises a polypeptide consensus sequence having at least 95% sequence identity to the amino acid sequence of SEQ ID NO: 463. In some embodiments, the antibody or antigen binding fragment thereof binds a human ENO2, mouse ENO2, rat ENO2, bovine ENO2, or cynomolgus monkey ENO2. In some embodiments, the human ENO2 comprises a sequence of SEQ ID NO: 4465.

[0317] Provided herein is an antibody that competes with an antibody or antigen binding fragment of any one of claims 797-800 for binding to ENO2, wherein the antibody binds to human ENO2 or mouse ENO2.

[0318] Provided herein is an antibody or an antigen binding fragment thereof that selectively binds to chromosome 11 open reading frame 68, transcript variant 1 (C11orf68) or a variant thereof, comprising at least one of: a variable heavy chain region, wherein the variable heavy chain region comprises a complementarity-determining region heavy chain 1 (CDR-H1) of SEQ ID NO: 734, CDR-H2 of SEQ ID NO: 1276, and CDR-H3 of SEQ ID NO: 1818; and/or a variable light chain region, wherein the variable light chain region comprises a complementarity-determining region light chain 1 (CDR-L1) of SEQ ID NO: 1005, CDR-L2 of SEQ ID NO: 1547, and CDR-L3 of SEQ ID NO: 2089. In some embodiments, the variable heavy chain comprises a polypeptide consensus sequence having at least 95% sequence identity to the amino acid sequence of SEQ ID NO: 192, and the variable light chain comprises a polypeptide consensus sequence having at least 95% sequence identity to the amino acid sequence of SEQ ID NO: 463. In some embodiments, the antibody or antigen binding fragment thereof binds a human C11orf68, mouse C11orf68, rat C11orf68, bovine C11orf68, or cynomolgus monkey C11orf68. In some embodiments, the human C11orf68 comprises a sequence of SEQ ID NO: 4466.

[0319] Provided herein is an antibody that competes with an antibody or antigen binding fragment of any one of claims 802-805 for binding to C11orf68, wherein the antibody binds to human C11orf68 or mouse C11orf68.

[0320] Provided herein is an antibody or an antigen binding fragment thereof that selectively binds to methionyl-tRNA synthetase 1 (MARS) or a variant thereof, comprising at least one of: a variable heavy chain region, wherein the variable heavy chain region comprises a complementarity-determining region heavy chain 1 (CDR-H1) of SEQ ID NO: 735, CDR-H2 of SEQ ID NO: 1277, and CDR-H3 of SEQ ID NO: 1819; and/or a variable light chain region, wherein the variable light chain region comprises a complementarity-determining region light chain 1 (CDR-L1) of SEQ ID NO: 1006, CDR-L2 of SEQ ID NO: 1548, and CDR-L3 of SEQ ID NO: 2090. In some embodiments, the variable heavy chain comprises a polypeptide consensus sequence having at least 95% sequence identity to the amino acid sequence of SEQ ID NO: 193, and the variable light chain comprises a polypeptide consensus sequence having at least 95% sequence identity to the amino acid sequence of SEQ ID NO: 464. In some embodiments, the antibody or antigen binding fragment thereof binds a human MARS, mouse MARS, rat MARS, bovine MARS, or cynomolgus monkey MARS. In some embodiments, the human MARS comprises a sequence of SEQ ID NO: 4467.

[0321] Provided herein is an antibody that competes with an antibody or antigen binding fragment of any one of claims 807-810 for binding to MARS, wherein the antibody binds to human MARS or mouse MARS.

[0322] Provided herein is an antibody or an antigen binding fragment thereof that selectively binds to serpin family B member 6, transcript variant 2 (SERPINB6) or a variant thereof, comprising at least one of: a variable heavy chain region, wherein the variable heavy chain region comprises a complementarity-determining region heavy chain 1 (CDR-H1) of SEQ ID NO: 737, CDR-H2 of SEQ ID NO: 1279, and CDR-H3 of SEQ ID NO: 1821; and/or a variable light chain region, wherein the variable light chain region comprises a complementarity-determining region light chain 1 (CDR-L1) of SEQ ID NO: 1008, CDR-L2 of SEQ ID NO: 1550, and CDR-L3 of SEQ ID NO: 2092. In some embodiments, the variable heavy chain comprises a polypeptide consensus sequence having at least 95% sequence identity to the amino acid sequence of SEQ ID NO: 195, and the variable light chain comprises a polypeptide consensus sequence having at least 95% sequence identity to the amino acid sequence of SEQ ID NO: 466. In some embodiments, the antibody or antigen binding fragment thereof binds a human SERPINB6, mouse SERPINB6, rat SERPINB6, bovine SERPINB6, or cynomolgus monkey SERPINB6. In some embodiments, the human SERPINB6 comprises a sequence of SEQ ID NO: 4468.

[0323] Provided herein is an antibody that competes with an antibody or antigen binding fragment of any one of claims 812-815 for binding to SERPINB6, wherein the antibody binds to human SERPINB6 or mouse SERPINB6.

[0324] Provided herein is an antibody or an antigen binding fragment thereof that selectively binds to endoplasmic reticulum protein 27, transcript variant 1 (ERP27) or a variant thereof, comprising at least one of: a variable heavy chain region, wherein the variable heavy chain region comprises a complementarity-determining region heavy chain 1 (CDR-H1) of SEQ ID NO: 738, CDR-H2 of SEQ ID NO: 1280, and CDR-H3 of SEQ ID NO: 1822; and/or a variable light chain region, wherein the variable light chain region comprises a complementarity-determining region light chain 1 (CDR-L1) of SEQ ID NO: 1009, CDR-L2 of SEQ ID NO: 1551, and CDR-L3 of SEQ ID NO: 2093. In some embodiments, the variable heavy chain comprises a polypeptide consensus sequence having at least 95% sequence identity to the amino acid sequence of SEQ ID NO: 196, and the variable light chain comprises a polypeptide consensus sequence having at least 95% sequence identity to the amino acid sequence of SEQ ID NO: 467. In some embodiments, the antibody or antigen binding fragment thereof binds a human ERP27, mouse ERP27, rat ERP27, bovine ERP27, or cynomolgus monkey ERP27. In some embodiments, the human ERP27 comprises a sequence of SEQ ID NO: 4469.

[0325] Provided herein is an antibody that competes with an antibody or antigen binding fragment of any one of claims 817-820 for binding to ERP27, wherein the antibody binds to human ERP27 or mouse ERP27.

[0326] Provided herein is an antibody or an antigen binding fragment thereof that selectively binds to Dpy-30 histone methyltransferase complex regulatory subunit (DPY30) or a variant thereof, comprising at least one of:

[0327] a variable heavy chain region, wherein the variable heavy chain region comprises a complementarity-determining region heavy chain 1 (CDR-H1) of SEQ ID NO: 738, CDR-H2 of SEQ ID NO: 1280, and CDR-H3 of SEQ ID NO: 1822; and/or a variable light chain region, wherein the variable light chain region comprises a complementarity-determining region light chain 1 (CDR-L1) of SEQ ID NO: 1009, CDR-L2 of SEQ ID NO: 1551, and CDR-L3 of SEQ ID NO: 2093. In some embodiments, the variable heavy chain comprises a polypeptide consensus sequence having at least 95% sequence identity to the amino acid sequence of SEQ ID NO: 196, and the variable light chain comprises a polypeptide consensus sequence having at least 95% sequence identity to the amino acid sequence of SEQ ID NO: 467. In some embodiments, the antibody or antigen binding fragment thereof binds a human DPY30, mouse DPY30, rat DPY30, bovine DPY30, or cynomolgus monkey DPY30. In some embodiments, the human DPY30 comprises a sequence of SEQ ID NO: 4470.

[0328] Provided herein is an antibody that competes with an antibody or antigen binding fragment of any one of claims 822-825 for binding to DPY30, wherein the antibody binds to human DPY30 or mouse DPY30.

[0329] Provided herein is an antibody or an antigen binding fragment thereof that selectively binds to rhophilin associated tail protein 1 like, transcript variant 2 (ROPN1L) or a variant thereof, comprising at least one of: a variable heavy chain region, wherein the variable heavy chain region comprises a complementarity-determining region heavy chain 1 (CDR-H1) of SEQ ID NO: 738, CDR-H2 of SEQ ID NO: 1280, and CDR-H3 of SEQ ID NO: 1822; and/or a variable light chain region, wherein the variable light chain region comprises a complementarity-determining region light chain 1 (CDR-L1) of SEQ ID NO: 1009, CDR-L2 of SEQ ID NO: 1551, and CDR-L3 of SEQ ID NO: 2093. In some embodiments, the variable heavy chain comprises a polypeptide consensus sequence having at least 95% sequence identity to the amino acid sequence of SEQ ID NO: 196, and the variable light chain comprises a polypeptide consensus sequence having at least 95% sequence identity to the amino acid sequence of SEQ ID NO: 467. In some embodiments, the antibody or antigen binding fragment thereof binds a human ROPN1L, mouse ROPN1L, rat ROPN1L, bovine ROPN1L, or cynomolgus monkey ROPN1L. In some embodiments, the human ROPN1L comprises a sequence of SEQ ID NO: 4471.

[0330] Provided herein is an antibody that competes with an antibody or antigen binding fragment of any one of claims 827-830 for binding to ROPN1L, wherein the antibody binds to human ROPN1L or mouse ROPN1L.

[0331] Provided herein is an antibody or an antigen binding fragment thereof that selectively binds to endosome associated trafficking regulator 1, transcript variant 2 (SDCCAG3) or a variant thereof, comprising at least one of: a variable heavy chain region, wherein the variable heavy chain region comprises a complementarity-determining region heavy chain 1 (CDR-H1) of SEQ ID NO: 739, CDR-H2 of SEQ ID NO: 1281, and CDR-H3 of SEQ ID NO: 1823; and/or a variable light chain region, wherein the variable light chain region comprises a complementarity-determining region light chain 1 (CDR-L1) of SEQ ID NO: 1010, CDR-L2 of SEQ ID NO: 1552, and CDR-L3 of SEQ ID NO: 2094. In some embodiments, the variable heavy chain comprises a polypeptide consensus sequence having at least 95% sequence identity to the amino acid sequence of SEQ ID NO: 197, and the variable light chain comprises a polypeptide consensus sequence having at least 95% sequence identity to the amino acid sequence of SEQ ID NO: 468. In some embodiments, the antibody or antigen binding fragment thereof binds a human SDCCAG3, mouse SDCCAG3, rat SDCCAG3, bovine SDCCAG3, or cynomolgus monkey SDCCAG3. In some embodiments, the human SDCCAG3 comprises a sequence of SEQ ID NO: 4373.

[0332] Provided herein is an antibody that competes with an antibody or antigen binding fragment of any one of claims 832-835 for binding to SDCCAG3, wherein the antibody binds to human SDCCAG3 or mouse SDCCAG3.

[0333] Provided herein is an antibody or an antigen binding fragment thereof that selectively binds to Jupiter microtubule associated homolog 2 (HN1L) or a variant thereof, comprising at least one of: a variable heavy chain region, wherein the variable heavy chain region comprises a complementarity-determining region heavy chain 1 (CDR-H1) of SEQ ID NO: 740, CDR-H2 of SEQ ID NO: 1282, and CDR-H3 of SEQ ID NO: 1824; and/or a variable light chain region, wherein the variable light chain region comprises a complementarity-determining region light chain 1 (CDR-L1) of SEQ ID NO: 1011, CDR-L2 of SEQ ID NO: 1553, and CDR-L3 of SEQ ID NO: 2095. In some embodiments, the variable heavy chain comprises a polypeptide consensus sequence having at least 95% sequence identity to the amino acid sequence of SEQ ID NO: 198, and the variable light chain comprises a polypeptide consensus sequence having at least 95% sequence identity to the amino acid sequence of SEQ ID NO: 469. In some embodiments, the antibody or antigen binding fragment thereof binds a human HN1L, mouse HN1L, rat HN1L, bovine HN1L, or cynomolgus monkey HN1L. In some embodiments, the human HN1L comprises a sequence of SEQ ID NO: 4395.

[0334] Provided herein is an antibody that competes with an antibody or antigen binding fragment of any one of claims 837-840 for binding to HN1L, wherein the antibody binds to human HN1L or mouse HN1L.

[0335] Provided herein is an antibody or an antigen binding fragment thereof that selectively binds to BTB domain containing 8 (BTBD8) or a variant thereof, comprising at least one of: a variable heavy chain region, wherein the variable heavy chain region comprises a complementarity-determining region heavy chain 1 (CDR-H1) of SEQ ID NO: 740, CDR-H2 of SEQ ID NO: 1282, and CDR-H3 of SEQ ID NO: 1824; and/or a variable light chain region, wherein the variable light chain region comprises a complementarity-determining region light chain 1 (CDR-L1) of SEQ ID NO: 1011, CDR-L2 of SEQ ID NO: 1553, and CDR-L3 of SEQ ID NO: 2095. In some embodiments, the variable heavy chain comprises a polypeptide consensus sequence having at least 95% sequence identity to the amino acid sequence of SEQ ID NO: 198, and the variable light chain comprises a polypeptide consensus sequence having at least 95% sequence identity to the amino acid sequence of SEQ ID NO: 469. In some embodiments, the antibody or antigen binding fragment thereof binds a human BTBD8, mouse BTBD8, rat BTBD8, bovine BTBD8, or cynomolgus monkey BTBD8. In some embodiments, the human BTBD8 comprises a sequence of SEQ ID NO: 4472.

[0336] Provided herein is an antibody that competes with an antibody or antigen binding fragment of any one of claims 842-845 for binding to BTBD8, wherein the antibody binds to human BTBD8 or mouse BTBD8.

[0337] Provided herein is an antibody or an antigen binding fragment thereof that selectively binds to neutrophil cytosolic factor 4, transcript variant 2 (NCF4) or a variant thereof, comprising at least one of: a variable heavy chain region, wherein the variable heavy chain region comprises a complementarity-determining region heavy chain 1 (CDR-H1) of SEQ ID NO: 741, CDR-H2 of SEQ ID NO: 1283, and CDR-H3 of SEQ ID NO: 1825; and/or a variable light chain region, wherein the variable light chain region comprises a complementarity-determining region light chain 1 (CDR-L1) of SEQ ID NO: 1012, CDR-L2 of SEQ ID NO: 1554, and CDR-L3 of SEQ ID NO: 2096. In some embodiments, the variable heavy chain comprises a polypeptide consensus sequence having at least 95% sequence identity to the amino acid sequence of SEQ ID NO: 199, and the variable light chain comprises a polypeptide consensus sequence having at least 95% sequence identity to the amino acid sequence of SEQ ID NO: 470. In some embodiments, the antibody or antigen binding fragment thereof binds a human NCF4, mouse NCF4, rat NCF4, bovine NCF4, or cynomolgus monkey NCF4. In some embodiments, the human NCF4 comprises a sequence of SEQ ID NO: 4473.

[0338] Provided herein is an antibody that competes with an antibody or antigen binding fragment of any one of claims 847-850 for binding to NCF4, wherein the antibody binds to human NCF4 or mouse NCF4.

[0339] Provided herein is an antibody or an antigen binding fragment thereof that selectively binds to t-complex 11 like 2, transcript variant X2 (TCP11L2) or a variant thereof, comprising at least one of: a variable heavy chain region, wherein the variable heavy chain region comprises a complementarity-determining region heavy chain 1 (CDR-H1) of SEQ ID NO: 741, CDR-H2 of SEQ ID NO: 1283, and CDR-H3 of SEQ ID NO: 1825; and/or a variable light chain region, wherein the variable light chain region comprises a complementarity-determining region light chain 1 (CDR-L1) of SEQ ID NO: 1012, CDR-L2 of SEQ ID NO: 1554, and CDR-L3 of SEQ ID NO: 2096. In some embodiments, the variable heavy chain comprises a polypeptide consensus sequence having at least 95% sequence identity to the amino acid sequence of SEQ ID NO: 199, and the variable light chain comprises a polypeptide consensus sequence having at least 95% sequence identity to the amino acid sequence of SEQ ID NO: 470. In some embodiments, the antibody or antigen binding fragment thereof binds a human TCP11L2, mouse TCP11L2, rat TCP11L2, bovine TCP11L2, or cynomolgus monkey TCP11L2. In some embodiments, the human TCP11L2 comprises a sequence of SEQ ID NO: 4474.

[0340] Provided herein is an antibody that competes with an antibody or antigen binding fragment of any one of claims 852-855 for binding to TCP11L2, wherein the antibody binds to human TCP11L2 or mouse TCP11L2.

[0341] Provided herein is an antibody or an antigen binding fragment thereof that selectively binds to phospholipase C beta 2, transcript variant 4 (PLCB2) or a variant thereof, comprising at least one of: a variable heavy chain region, wherein the variable heavy chain region comprises a complementarity-determining region heavy chain 1 (CDR-H1) of SEQ ID NO: 741, CDR-H2 of SEQ ID NO: 1283, and CDR-H3 of SEQ ID NO: 1825; and/or

[0342] a variable light chain region, wherein the variable light chain region comprises a complementarity-determining region light chain 1 (CDR-L1) of SEQ ID NO: 1012, CDR-L2 of SEQ ID NO: 1554, and CDR-L3 of SEQ ID NO: 2096. In some embodiments, the variable heavy chain comprises a polypeptide consensus sequence having at least 95% sequence identity to the amino acid sequence of SEQ ID NO: 199, and the variable light chain comprises a polypeptide consensus sequence having at least 95% sequence identity to the amino acid sequence of SEQ ID NO: 470. In some embodiments, the antibody or antigen binding fragment thereof binds a human PLCB2, mouse PLCB2, rat PLCB2, bovine PLCB2, or cynomolgus monkey PLCB2. In some embodiments, the human PLCB2 comprises a sequence of SEQ ID NO: 4475.

[0343] Provided herein is an antibody that competes with an antibody or antigen binding fragment of any one of claims 857-860 for binding to PLCB2, wherein the antibody binds to human PLCB2 or mouse PLCB2.

[0344] Provided herein is an antibody or an antigen binding fragment thereof that selectively binds to microtubule associated protein RP/EB family member 2, transcript variant 1 (MAPRE2) or a variant thereof, comprising at least one of: a variable heavy chain region, wherein the variable heavy chain region comprises a complementarity-determining region heavy chain 1 (CDR-H1) of SEQ ID NO: 742, CDR-H2 of SEQ ID NO: 1284, and CDR-H3 of SEQ ID NO: 1826; and/or a variable light chain region, wherein the variable light chain region comprises a complementarity-determining region light chain 1 (CDR-L1) of SEQ ID NO: 1013, CDR-L2 of SEQ ID NO: 1555, and CDR-L3 of SEQ ID NO: 2097. In some embodiments, the variable heavy chain comprises a polypeptide consensus sequence having at least 95% sequence identity to the amino acid sequence of SEQ ID NO: 200, and the variable light chain comprises a polypeptide consensus sequence having at least 95% sequence identity to the amino acid sequence of SEQ ID NO: 471. In some embodiments, the antibody or antigen binding fragment thereof binds a human MAPRE2, mouse MAPRE2, rat MAPRE2, bovine MAPRE2, or cynomolgus monkey MAPRE2. In some embodiments, the human MAPRE2 comprises a sequence of SEQ ID NO: 4476.

[0345] Provided herein is an antibody that competes with an antibody or antigen binding fragment of any one of claims 862-865 for binding to MAPRE2, wherein the antibody binds to human MAPRE2 or mouse MAPRE2.

[0346] Provided herein is an antibody or an antigen binding fragment thereof that selectively binds to DEAD-box helicase 53 (DDX53) or a variant thereof, comprising at least one of: a variable heavy chain region, wherein the variable heavy chain region comprises a complementarity-determining region heavy chain 1 (CDR-H1) of SEQ ID NO: 743, CDR-H2 of SEQ ID NO: 1285, and CDR-H3 of SEQ ID NO: 1827; and/or a variable light chain region, wherein the variable light chain region comprises a complementarity-determining region light chain 1 (CDR-L1) of SEQ ID NO: 1014, CDR-L2 of SEQ ID NO: 1556, and CDR-L3 of SEQ ID NO: 2098. In some embodiments, the variable heavy chain comprises a polypeptide consensus sequence having at least 95% sequence identity to the amino acid sequence of SEQ ID NO: 201, and the variable light chain comprises a polypeptide consensus sequence having at least 95% sequence identity to the amino acid sequence of SEQ ID NO: 472. In some embodiments, the antibody or antigen binding fragment thereof binds a human DDX53, mouse DDX53, rat DDX53, bovine DDX53, or cynomolgus monkey DDX53. In some embodiments, the human DDX53 comprises a sequence of SEQ ID NO: 4477.

[0347] Provided herein is an antibody that competes with an antibody or antigen binding fragment of any one of claims 867-870 for binding to DDX53, wherein the antibody binds to human DDX53 or mouse DDX53.

[0348] Provided herein is an antibody or an antigen binding fragment thereof that selectively binds to interleukin 27 receptor subunit alpha (IL27RA) or a variant thereof, comprising at least one of: a variable heavy chain region, wherein the variable heavy chain region comprises a complementarity-determining region heavy chain 1 (CDR-H1) of SEQ ID NO: 744, CDR-H2 of SEQ ID NO: 1286, and CDR-H3 of SEQ ID NO: 1828; and/or a variable light chain region, wherein the variable light chain region comprises a complementarity-determining region light chain 1 (CDR-L1) of SEQ ID NO: 1015, CDR-L2 of SEQ ID NO: 1557, and CDR-L3 of SEQ ID NO: 2099. In some embodiments, the variable heavy chain comprises a polypeptide consensus sequence having at least 95% sequence identity to the amino acid sequence of SEQ ID NO: 202, and the variable light chain comprises a polypeptide consensus sequence having at least 95% sequence identity to the amino acid sequence of SEQ ID NO: 473. In some embodiments, the antibody or antigen binding fragment thereof binds a human IL27RA, mouse IL27RA, rat IL27RA, bovine IL27RA, or cynomolgus monkey IL27RA. In some embodiments, the human IL27RA comprises a sequence of SEQ ID NO: 4478.

[0349] Provided herein is an antibody that competes with an antibody or antigen binding fragment of any one of claims 872-875 for binding to IL27RA, wherein the antibody binds to human IL27RA or mouse IL27RA.

[0350] Provided herein is an antibody or an antigen binding fragment thereof that selectively binds to Deoxyhypusine synthase (DHPS) or a variant thereof, comprising at least one of: a variable heavy chain region, wherein the variable heavy chain region comprises a complementarity-determining region heavy chain 1 (CDR-H1) of SEQ ID NO: 745, CDR-H2 of SEQ ID NO: 1287, and CDR-H3 of SEQ ID NO: 1829; and/or a variable light chain region, wherein the variable light chain region comprises a complementarity-determining region light chain 1 (CDR-L1) of SEQ ID NO: 1016, CDR-L2 of SEQ ID NO: 1558, and CDR-L3 of SEQ ID NO: 2100. In some embodiments, the variable heavy chain comprises a polypeptide consensus sequence having at least 95% sequence identity to the amino acid sequence of SEQ ID NO: 203, and the variable light chain comprises a polypeptide consensus sequence having at least 95% sequence identity to the amino acid sequence of SEQ ID NO: 474. In some embodiments, the antibody or antigen binding fragment thereof binds a human DHPS, mouse DHPS, rat DHPS, bovine DHPS, or cynomolgus monkey DHPS. In some embodiments, the human DHPS comprises a sequence of SEQ ID NO: 4479.

[0351] Provided herein is an antibody that competes with an antibody or antigen binding fragment of any one of claims 877-880 for binding to DHPS, wherein the antibody binds to human DHPS or mouse DHPS.

[0352] Provided herein is an antibody or an antigen binding fragment thereof that selectively binds to HEAT repeat containing 3, transcript variant 1 (HEATR3) or a variant thereof, comprising at least one of:

[0353] a variable heavy chain region, wherein the variable heavy chain region comprises a complementarity-determining region heavy chain 1 (CDR-H1) of SEQ ID NO: 746, CDR-H2 of SEQ ID NO: 1288, and CDR-H3 of SEQ ID NO: 1830; and/or a variable light chain region, wherein the variable light chain region comprises a complementarity-determining region light chain 1 (CDR-L1) of SEQ ID NO: 1017, CDR-L2 of SEQ ID NO: 1559, and CDR-L3 of SEQ ID NO: 2101. In some embodiments, the variable heavy chain comprises a polypeptide consensus sequence having at least 95% sequence identity to the amino acid sequence of SEQ ID NO: 204, and the variable light chain comprises a polypeptide consensus sequence having at least 95% sequence identity to the amino acid sequence of SEQ ID NO: 475. In some embodiments, the antibody or antigen binding fragment thereof binds a human HEATR3, mouse HEATR3, rat HEATR3, bovine HEATR3, or cynomolgus monkey HEATR3. In some embodiments, the human HEATR3 comprises a sequence of SEQ ID NO: 4480.

[0354] Provided herein is an antibody that competes with an antibody or antigen binding fragment of any one of claims 882-885 for binding to HEATR3, wherein the antibody binds to human HEATR3 or mouse HEATR3.

[0355] Provided herein is an antibody or an antigen binding fragment thereof that selectively binds to DEAD-box helicase 53 (DDX53) or a variant thereof, comprising at least one of: a variable heavy chain region, wherein the variable heavy chain region comprises a complementarity-determining region heavy chain 1 (CDR-H1) of SEQ ID NO: 747, CDR-H2 of SEQ ID NO: 1289, and CDR-H3 of SEQ ID NO: 1831; and/or a variable light chain region, wherein the variable light chain region comprises a complementarity-determining region light chain 1 (CDR-L1) of SEQ ID NO: 1018, CDR-L2 of SEQ ID NO: 1560, and CDR-L3 of SEQ ID NO: 2102. In some embodiments, the variable heavy chain comprises a polypeptide consensus sequence having at least 95% sequence identity to the amino acid sequence of SEQ ID NO: 205, and the variable light chain comprises a polypeptide consensus sequence having at least 95% sequence identity to the amino acid sequence of SEQ ID NO: 476. In some embodiments, the antibody or antigen binding fragment thereof binds a human DDX53, mouse DDX53, rat DDX53, bovine DDX53, or cynomolgus monkey DDX53. In some embodiments, the human DDX53 comprises a sequence of SEQ ID NO: 4477.

[0356] Provided herein is an antibody that competes with an antibody or antigen binding fragment of any one of claims 887-890 for binding to DDX53, wherein the antibody binds to human DDX53 or mouse DDX53.

[0357] Provided herein is an antibody or an antigen binding fragment thereof that selectively binds to Vezatin, adherens junctions transmembrane protein (VEZT) or a variant thereof, comprising at least one of: a variable heavy chain region, wherein the variable heavy chain region comprises a complementarity-determining region heavy chain 1 (CDR-H1) of SEQ ID NO: 747, CDR-H2 of SEQ ID NO: 1289, and CDR-H3 of SEQ ID NO: 1831; and/or a variable light chain region, wherein the variable light chain region comprises a complementarity-determining region light chain 1 (CDR-L1) of SEQ ID NO: 1018, CDR-L2 of SEQ ID NO: 1560, and CDR-L3 of SEQ ID NO: 2102. In some embodiments, the variable heavy chain comprises a polypeptide consensus sequence having at least 95% sequence identity to the amino acid sequence of SEQ ID NO: 205, and the variable light chain comprises a polypeptide consensus sequence having at least 95% sequence identity to the amino acid sequence of SEQ ID NO: 476. In some embodiments, the antibody or antigen binding fragment thereof binds a human VEZT, mouse VEZT, rat VEZT, bovine VEZT, or cynomolgus monkey VEZT. In some embodiments, the human VEZT comprises a sequence of SEQ ID NO: 4481.

[0358] Provided herein is an antibody that competes with an antibody or antigen binding fragment of any one of claims 892-895 for binding to VEZT, wherein the antibody binds to human VEZT or mouse VEZT.

[0359] Provided herein is an antibody or an antigen binding fragment thereof that selectively binds to Wd repeat domain 3 (WDR3) or a variant thereof, comprising at least one of: a variable heavy chain region, wherein the variable heavy chain region comprises a complementarity-determining region heavy chain 1 (CDR-H1) of SEQ ID NO: 747, CDR-H2 of SEQ ID NO: 1289, and CDR-H3 of SEQ ID NO: 1831; and/or a variable light chain region, wherein the variable light chain region comprises a complementarity-determining region light chain 1 (CDR-L1) of SEQ ID NO: 1018, CDR-L2 of SEQ ID NO: 1560, and CDR-L3 of SEQ ID NO: 2102. In some embodiments, the variable heavy chain comprises a polypeptide consensus sequence having at least 95% sequence identity to the amino acid sequence of SEQ ID NO: 205, and the variable light chain comprises a polypeptide consensus sequence having at least 95% sequence identity to the amino acid sequence of SEQ ID NO: 476. In some embodiments, the antibody or antigen binding fragment thereof binds a human WDR3, mouse WDR3, rat WDR3, bovine WDR3, or cynomolgus monkey WDR3. In some embodiments, the human WDR3 comprises a sequence of SEQ ID NO: 4482.

[0360] Provided herein is an antibody that competes with an antibody or antigen binding fragment of any one of claims 897-900 for binding to WDR3, wherein the antibody binds to human WDR3 or mouse WDR3.

[0361] Provided herein is an antibody or an antigen binding fragment thereof that selectively binds to DExD/H-box helicase 58 (DDX58) or a variant thereof, comprising at least one of: a variable heavy chain region, wherein the variable heavy chain region comprises a complementarity-determining region heavy chain 1 (CDR-H1) of SEQ ID NO: 748, CDR-H2 of SEQ ID NO: 1290, and CDR-H3 of SEQ ID NO: 1832; and/or a variable light chain region, wherein the variable light chain region comprises a complementarity-determining region light chain 1 (CDR-L1) of SEQ ID NO: 1019, CDR-L2 of SEQ ID NO: 1561, and CDR-L3 of SEQ ID NO: 2103. In some embodiments, the variable heavy chain comprises a polypeptide consensus sequence having at least 95% sequence identity to the amino acid sequence of SEQ ID NO: 206, and the variable light chain comprises a polypeptide consensus sequence having at least 95% sequence identity to the amino acid sequence of SEQ ID NO: 477. In some embodiments, the antibody or antigen binding fragment thereof binds a human DDX58, mouse DDX58, rat DDX58, bovine DDX58, or cynomolgus monkey DDX58. In some embodiments, the human DDX58 comprises a sequence of SEQ ID NO: 4483.

[0362] Provided herein is an antibody that competes with an antibody or antigen binding fragment of any one of claims 902-905 for binding to DDX58, wherein the antibody binds to human DDX58 or mouse DDX58.

[0363] Provided herein is an antibody or an antigen binding fragment thereof that selectively binds to DExD/H-box helicase 58 (DDX58) or a variant thereof, comprising at least one of: a variable heavy chain region, wherein the variable heavy chain region comprises a complementarity-determining region heavy chain 1 (CDR-H1) of SEQ ID NO: 748, CDR-H2 of SEQ ID NO: 1290, and CDR-H3 of SEQ ID NO: 1832; and/or a variable light chain region, wherein the variable light chain region comprises a complementarity-determining region light chain 1 (CDR-L1) of SEQ ID NO: 1019, CDR-L2 of SEQ ID NO: 1561, and CDR-L3 of SEQ ID NO: 2103. In some embodiments, the variable heavy chain comprises a polypeptide consensus sequence having at least 95% sequence identity to the amino acid sequence of SEQ ID NO: 206, and the variable light chain comprises a polypeptide consensus sequence having at least 95% sequence identity to the amino acid sequence of SEQ ID NO: 477. In some embodiments, the antibody or antigen binding fragment thereof binds a human DDX58, mouse DDX58, rat DDX58, bovine DDX58, or cynomolgus monkey DDX58. In some embodiments, the human DDX58 comprises a sequence of SEQ ID NO: 4483.

[0364] Provided herein is an antibody that competes with an antibody or antigen binding fragment of any one of claims 907-910 for binding to DDX58, wherein the antibody binds to human DDX58 or mouse DDX58.

[0365] Provided herein is an antibody or an antigen binding fragment thereof that selectively binds to nudix hydrolase 22, transcript variant 2 (NUDT22) or a variant thereof, comprising at least one of: a variable heavy chain region, wherein the variable heavy chain region comprises a complementarity-determining region heavy chain 1 (CDR-H1) of SEQ ID NO: 749, CDR-H2 of SEQ ID NO: 1291, and CDR-H3 of SEQ ID NO: 1833; and/or a variable light chain region, wherein the variable light chain region comprises a complementarity-determining region light chain 1 (CDR-L1) of SEQ ID NO: 1020, CDR-L2 of SEQ ID NO: 1562, and CDR-L3 of SEQ ID NO: 2104. In some embodiments, the variable heavy chain comprises a polypeptide consensus sequence having at least 95% sequence identity to the amino acid sequence of SEQ ID NO: 207, and the variable light chain comprises a polypeptide consensus sequence having at least 95% sequence identity to the amino acid sequence of SEQ ID NO: 478. In some embodiments, the antibody or antigen binding fragment thereof binds a human NUDT22, mouse NUDT22, rat NUDT22, bovine NUDT22, or cynomolgus monkey NUDT22. In some embodiments, the human NUDT22 comprises a sequence of SEQ ID NO: 4484.

[0366] Provided herein is an antibody that competes with an antibody or antigen binding fragment of any one of claims 912-915 for binding to NUDT22, wherein the antibody binds to human NUDT22 or mouse NUDT22.

[0367] Provided herein is an antibody or an antigen binding fragment thereof that selectively binds to Jupiter microtubule associated homolog 2 (HN1L) or a variant thereof, comprising at least one of: a variable heavy chain region, wherein the variable heavy chain region comprises a complementarity-determining region heavy chain 1 (CDR-H1) of SEQ ID NO: 750, CDR-H2 of SEQ ID NO: 1292, and CDR-H3 of SEQ ID NO: 1834; and/or a variable light chain region, wherein the variable light chain region comprises a complementarity-determining region light chain 1 (CDR-L1) of SEQ ID NO: 1021, CDR-L2 of SEQ ID NO: 1563, and CDR-L3 of SEQ ID NO: 2105. In some embodiments, the variable heavy chain comprises a polypeptide consensus sequence having at least 95% sequence identity to the amino acid sequence of SEQ ID NO: 208, and

[0368] the variable light chain comprises a polypeptide consensus sequence having at least 95% sequence identity to the amino acid sequence of SEQ ID NO: 479. In some embodiments, the antibody or antigen binding fragment thereof binds a human HN1L, mouse HN1L, rat HN1L, bovine HN1L, or cynomolgus monkey HN1L. In some embodiments, the human HN1L comprises a sequence of SEQ ID NO: 4395.

[0369] Provided herein is an antibody that competes with an antibody or antigen binding fragment of any one of claims 917-920 for binding to HN1L, wherein the antibody binds to human HN1L or mouse HN1L.

[0370] Provided herein is an antibody or an antigen binding fragment thereof that selectively binds to grancalcin, transcript variant 4 (GCA) or a variant thereof, comprising at least one of: a variable heavy chain region, wherein the variable heavy chain region comprises a complementarity-determining region heavy chain 1 (CDR-H1) of SEQ ID NO: 751, CDR-H2 of SEQ ID NO: 1293, and CDR-H3 of SEQ ID NO: 1835; and/or a variable light chain region, wherein the variable light chain region comprises a complementarity-determining region light chain 1 (CDR-L1) of SEQ ID NO: 1022, CDR-L2 of SEQ ID NO: 1564, and CDR-L3 of SEQ ID NO: 2106. In some embodiments, the variable heavy chain comprises a polypeptide consensus sequence having at least 95% sequence identity to the amino acid sequence of SEQ ID NO: 209, and the variable light chain comprises a polypeptide consensus sequence having at least 95% sequence identity to the amino acid sequence of SEQ ID NO: 480. In some embodiments, the antibody or antigen binding fragment thereof binds a human GCA, mouse GCA, rat GCA, bovine GCA, or cynomolgus monkey GCA. In some embodiments, the human GCA comprises a sequence of SEQ ID NO: 4485.

[0371] Provided herein is an antibody that competes with an antibody or antigen binding fragment of any one of claims 922-925 for binding to GCA, wherein the antibody binds to human GCA or mouse GCA.

[0372] Provided herein is an antibody or an antigen binding fragment thereof that selectively binds to endoplasmic reticulum protein 27, transcript variant 1 (ERP27) or a variant thereof, comprising at least one of: a variable heavy chain region, wherein the variable heavy chain region comprises a complementarity-determining region heavy chain 1 (CDR-H1) of SEQ ID NO: 752, CDR-H2 of SEQ ID NO: 1294, and CDR-H3 of SEQ ID NO: 1836; and/or a variable light chain region, wherein the variable light chain region comprises a complementarity-determining region light chain 1 (CDR-L1) of SEQ ID NO: 1023, CDR-L2 of SEQ ID NO: 1565, and CDR-L3 of SEQ ID NO: 2107. In some embodiments, the variable heavy chain comprises a polypeptide consensus sequence having at least 95% sequence identity to the amino acid sequence of SEQ ID NO: 210, and the variable light chain comprises a polypeptide consensus sequence having at least 95% sequence identity to the amino acid sequence of SEQ ID NO: 481. In some embodiments, the antibody or antigen binding fragment thereof binds a human ERP27, mouse ERP27, rat ERP27, bovine ERP27, or cynomolgus monkey ERP27. In some embodiments, the human ERP27 comprises a sequence of SEQ ID NO: 4469.

[0373] Provided herein is an antibody that competes with an antibody or antigen binding fragment of any one of claims 927-930 for binding to ERP27, wherein the antibody binds to human ERP27 or mouse ERP27.

[0374] Provided herein is an antibody or an antigen binding fragment thereof that selectively binds to Rna polymerase iii subunit g (POLR3G) or a variant thereof, comprising at least one of: a variable heavy chain region, wherein the variable heavy chain region comprises a complementarity-determining region heavy chain 1 (CDR-H1) of SEQ ID NO: 753, CDR-H2 of SEQ ID NO: 1295, and CDR-H3 of SEQ ID NO: 1837; and/or a variable light chain region, wherein the variable light chain region comprises a complementarity-determining region light chain 1 (CDR-L1) of SEQ ID NO: 1024, CDR-L2 of SEQ ID NO: 1566, and CDR-L3 of SEQ ID NO: 2108. In some embodiments, the variable heavy chain comprises a polypeptide consensus sequence having at least 95% sequence identity to the amino acid sequence of SEQ ID NO: 211, and the variable light chain comprises a polypeptide consensus sequence having at least 95% sequence identity to the amino acid sequence of SEQ ID NO: 482. In some embodiments, the antibody or antigen binding fragment thereof binds a human POLR3G, mouse POLR3G, rat POLR3G, bovine POLR3G, or cynomolgus monkey POLR3G. In some embodiments, the human POLR3G comprises a sequence of SEQ ID NO: 4486.

[0375] Provided herein is an antibody that competes with an antibody or antigen binding fragment of any one of claims 932-935 for binding to POLR3G, wherein the antibody binds to human POLR3G or mouse POLR3G.

[0376] Provided herein is an antibody or an antigen binding fragment thereof that selectively binds to sorting nexin 1, transcript variant 1 (SNX1) or a variant thereof, comprising at least one of: a variable heavy chain region, wherein the variable heavy chain region comprises a complementarity-determining region heavy chain 1 (CDR-H1) of SEQ ID NO: 754, CDR-H2 of SEQ ID NO: 1296, and CDR-H3 of SEQ ID NO: 1838; and/or a variable light chain region, wherein the variable light chain region comprises a complementarity-determining region light chain 1 (CDR-L1) of SEQ ID NO: 1025, CDR-L2 of SEQ ID NO: 1567, and CDR-L3 of SEQ ID NO: 2109. In some embodiments, the variable heavy chain comprises a polypeptide consensus sequence having at least 95% sequence identity to the amino acid sequence of SEQ ID NO: 212, and the variable light chain comprises a polypeptide consensus sequence having at least 95% sequence identity to the amino acid sequence of SEQ ID NO: 483. In some embodiments, the antibody or antigen binding fragment thereof binds a human SNX1, mouse SNX1, rat SNX1, bovine SNX1, or cynomolgus monkey SNX1. In some embodiments, the human SNX1 comprises a sequence of SEQ ID NO: 4487.

[0377] Provided herein is an antibody that competes with an antibody or antigen binding fragment of any one of claims 937-940 for binding to SNX1, wherein the antibody binds to human SNX1 or mouse SNX1.

[0378] Provided herein is an antibody or an antigen binding fragment thereof that selectively binds to SAA2-SAA3 (AB937783.1_frag) or a variant thereof, comprising at least one of: a variable heavy chain region, wherein the variable heavy chain region comprises a complementarity-determining region heavy chain 1 (CDR-H1) of SEQ ID NO: 755, CDR-H2 of SEQ ID NO: 1297, and CDR-H3 of SEQ ID NO: 1839; and/or a variable light chain region, wherein the variable light chain region comprises a complementarity-determining region light chain 1 (CDR-L1) of SEQ ID NO: 1026, CDR-L2 of SEQ ID NO: 1568, and CDR-L3 of SEQ ID NO: 2110. In some embodiments, the variable heavy chain comprises a polypeptide consensus sequence having at least 95% sequence identity to the amino acid sequence of SEQ ID NO: 213, and the variable light chain comprises a polypeptide consensus sequence having at least 95% sequence identity to the amino acid sequence of SEQ ID NO: 484. In some embodiments, the antibody or antigen binding fragment thereof binds a human AB937783.1_frag, mouse AB937783.1_frag, rat AB937783.1_frag, bovine AB937783.1_frag, or cynomolgus monkey AB937783.1_frag. In some embodiments, the human AB937783.1_frag comprises a sequence of SEQ ID NO: 4488.

[0379] Provided herein is an antibody that competes with an antibody or antigen binding fragment of any one of claims 942-945 for binding to AB937783.1_frag, wherein the antibody binds to human AB937783.1_frag or mouse AB937783.1_frag.

[0380] Provided herein is an antibody or an antigen binding fragment thereof that selectively binds to proteasome 26S subunit, non-ATPase 3 (PSMD3) or a variant thereof, comprising at least one of: a variable heavy chain region, wherein the variable heavy chain region comprises a complementarity-determining region heavy chain 1 (CDR-H1) of SEQ ID NO: 755, CDR-H2 of SEQ ID NO: 1297, and CDR-H3 of SEQ ID NO: 1839; and/or a variable light chain region, wherein the variable light chain region comprises a complementarity-determining region light chain 1 (CDR-L1) of SEQ ID NO: 1026, CDR-L2 of SEQ ID NO: 1568, and CDR-L3 of SEQ ID NO: 2110. In some embodiments, the variable heavy chain comprises a polypeptide consensus sequence having at least 95% sequence identity to the amino acid sequence of SEQ ID NO: 213, and the variable light chain comprises a polypeptide consensus sequence having at least 95% sequence identity to the amino acid sequence of SEQ ID NO: 484. In some embodiments, the antibody or antigen binding fragment thereof binds a human PSMD3, mouse PSMD3, rat PSMD3, bovine PSMD3, or cynomolgus monkey PSMD3. In some embodiments, the human PSMD3 comprises a sequence of SEQ ID NO: 4489.

[0381] Provided herein is an antibody that competes with an antibody or antigen binding fragment of any one of claims 947-950 for binding to PSMD3, wherein the antibody binds to human PSMD3 or mouse PSMD3.

[0382] Provided herein is an antibody or an antigen binding fragment thereof that selectively binds to CRK like proto-oncogene, adaptor protein, transcript variant 1 (CRKL) or a variant thereof, comprising at least one of: a variable heavy chain region, wherein the variable heavy chain region comprises a complementarity-determining region heavy chain 1 (CDR-H1) of SEQ ID NO: 756, CDR-H2 of SEQ ID NO: 1298, and CDR-H3 of SEQ ID NO: 1840; and/or a variable light chain region, wherein the variable light chain region comprises a complementarity-determining region light chain 1 (CDR-L1) of SEQ ID NO: 1027, CDR-L2 of SEQ ID NO: 1569, and CDR-L3 of SEQ ID NO: 2111. In some embodiments, the variable heavy chain comprises a polypeptide consensus sequence having at least 95% sequence identity to the amino acid sequence of SEQ ID NO: 214, and the variable light chain comprises a polypeptide consensus sequence having at least 95% sequence identity to the amino acid sequence of SEQ ID NO: 485. In some embodiments, wherein the antibody or antigen binding fragment thereof binds a human CRKL, mouse CRKL, rat CRKL, bovine CRKL, or cynomolgus monkey CRKL. In some embodiments, the human CRKL comprises a sequence of SEQ ID NO: 4490.

[0383] Provided herein is an antibody that competes with an antibody or antigen binding fragment of any one of claims 952-955 for binding to CRKL, wherein the antibody binds to human CRKL or mouse CRKL.

[0384] Provided herein is an antibody or an antigen binding fragment thereof that selectively binds to F-box protein 2 (FBXO2) or a variant thereof, comprising at least one of: a variable heavy chain region, wherein the variable heavy chain region comprises a complementarity-determining region heavy chain 1 (CDR-H1) of SEQ ID NO: 757, CDR-H2 of SEQ ID NO: 1299, and CDR-H3 of SEQ ID NO: 1841; and/or a variable light chain region, wherein the variable light chain region comprises a complementarity-determining region light chain 1 (CDR-L1) of SEQ ID NO: 1028, CDR-L2 of SEQ ID NO: 1570, and CDR-L3 of SEQ ID NO: 2112. In some embodiments, the variable heavy chain comprises a polypeptide consensus sequence having at least 95% sequence identity to the amino acid sequence of SEQ ID NO: 215, and the variable light chain comprises a polypeptide consensus sequence having at least 95% sequence identity to the amino acid sequence of SEQ ID NO: 486. In some embodiments, the antibody or antigen binding fragment thereof binds a human FBXO2, mouse FBXO2, rat FBXO2, bovine FBXO2, or cynomolgus monkey FBXO2. In some embodiments, the human FBXO2 comprises a sequence of SEQ ID NO: 4491.

[0385] Provided herein is an antibody that competes with an antibody or antigen binding fragment of any one of claims 957-960 for binding to FBXO2, wherein the antibody binds to human FBXO2 or mouse FBXO2.

[0386] Provided herein is an antibody or an antigen binding fragment thereof that selectively binds to tubulin gamma 1 (TUBG1) or a variant thereof, comprising at least one of: a variable heavy chain region, wherein the variable heavy chain region comprises a complementarity-determining region heavy chain 1 (CDR-H1) of SEQ ID NO: 757, CDR-H2 of SEQ ID NO: 1299, and CDR-H3 of SEQ ID NO: 1841; and/or a variable light chain region, wherein the variable light chain region comprises a complementarity-determining region light chain 1 (CDR-L1) of SEQ ID NO: 1028, CDR-L2 of SEQ ID NO: 1570, and CDR-L3 of SEQ ID NO: 2112. In some embodiments, the variable heavy chain comprises a polypeptide consensus sequence having at least 95% sequence identity to the amino acid sequence of SEQ ID NO: 215, and the variable light chain comprises a polypeptide consensus sequence having at least 95% sequence identity to the amino acid sequence of SEQ ID NO: 486. In some embodiments, the antibody or antigen binding fragment thereof binds a human TUBG1, mouse TUBG1, rat TUBG1, bovine TUBG1, or cynomolgus monkey TUBG1. In some embodiments, the human TUBG1 comprises a sequence of SEQ ID NO: 4492.

[0387] Provided herein is an antibody that competes with an antibody or antigen binding fragment of any one of claims 962-965 for binding to TUBG1, wherein the antibody binds to human TUBG1 or mouse TUBG1.

[0388] Provided herein is an antibody or an antigen binding fragment thereof that selectively binds to oxidation resistance 1, transcript variant 1 (OXR1) or a variant thereof, comprising at least one of: a variable heavy chain region, wherein the variable heavy chain region comprises a complementarity-determining region heavy chain 1 (CDR-H1) of SEQ ID NO: 759, CDR-H2 of SEQ ID NO: 1301, and CDR-H3 of SEQ ID NO: 1843; and/or a variable light chain region, wherein the variable light chain region comprises a complementarity-determining region light chain 1 (CDR-L1) of SEQ ID NO: 1030, CDR-L2 of SEQ ID NO: 1572, and CDR-L3 of SEQ ID NO: 2114. In some embodiments, the variable heavy chain comprises a polypeptide consensus sequence having at least 95% sequence identity to the amino acid sequence of SEQ ID NO: 217, and the variable light chain comprises a polypeptide consensus sequence having at least 95% sequence identity to the amino acid sequence of SEQ ID NO: 488. In some embodiments, the antibody or antigen binding fragment thereof binds a human OXR1, mouse OXR1, rat OXR1, bovine OXR1, or cynomolgus monkey OXR1. In some embodiments, wherein the human OXR1 comprises a sequence of SEQ ID NO: 4493.

[0389] Provided herein is an antibody that competes with an antibody or antigen binding fragment of any one of claims 967-970 for binding to OXR1, wherein the antibody binds to human OXR1 or mouse OXR1.

[0390] Provided herein is an antibody or an antigen binding fragment thereof that selectively binds to Ankyrin repeat domain 20 family member a5, pseudogene (ANKRD20A5P) or a variant thereof, comprising at least one of: a variable heavy chain region, wherein the variable heavy chain region comprises a complementarity-determining region heavy chain 1 (CDR-H1) of SEQ ID NO: 760, CDR-H2 of SEQ ID NO: 1302, and CDR-H3 of SEQ ID NO: 1844; and/or a variable light chain region, wherein the variable light chain region comprises a complementarity-determining region light chain 1 (CDR-L1) of SEQ ID NO: 1031, CDR-L2 of SEQ ID NO: 1573, and CDR-L3 of SEQ ID NO: 2115. In some embodiments, the variable heavy chain comprises a polypeptide consensus sequence having at least 95% sequence identity to the amino acid sequence of SEQ ID NO: 218, and the variable light chain comprises a polypeptide consensus sequence having at least 95% sequence identity to the amino acid sequence of SEQ ID NO: 489. In some embodiments, the antibody or antigen binding fragment thereof binds a human ANKRD20A5P, mouse ANKRD20A5P, rat ANKRD20A5P, bovine ANKRD20A5P, or cynomolgus monkey ANKRD20A5P. In some embodiments, the human ANKRD20A5P comprises a sequence of SEQ ID NO: 4494.

[0391] Provided herein is an antibody that competes with an antibody or antigen binding fragment of any one of claims 972-975 for binding to ANKRD20A5P, wherein the antibody binds to human ANKRD20A5P or mouse ANKRD20A5P.

[0392] Provided herein is an antibody or an antigen binding fragment thereof that selectively binds to Kirre like nephrin family adhesion molecule 1 (KIRREL) or a variant thereof, comprising at least one of: a variable heavy chain region, wherein the variable heavy chain region comprises a complementarity-determining region heavy chain 1 (CDR-H1) of SEQ ID NO: 760, CDR-H2 of SEQ ID NO: 1302, and CDR-H3 of SEQ ID NO: 1844; and/or a variable light chain region, wherein the variable light chain region comprises a complementarity-determining region light chain 1 (CDR-L1) of SEQ ID NO: 1031, CDR-L2 of SEQ ID NO: 1573, and CDR-L3 of SEQ ID NO: 2115. In some embodiments, the variable heavy chain comprises a polypeptide consensus sequence having at least 95% sequence identity to the amino acid sequence of SEQ ID NO: 218, and the variable light chain comprises a polypeptide consensus sequence having at least 95% sequence identity to the amino acid sequence of SEQ ID NO: 489. In some embodiments, the antibody or antigen binding fragment thereof binds a human KIRREL, mouse KIRREL, rat KIRREL, bovine KIRREL, or cynomolgus monkey KIRREL. In some embodiments, the human KIRREL comprises a sequence of SEQ ID NO: 4495.

[0393] Provided herein is an antibody that competes with an antibody or antigen binding fragment of any one of claims 977-980 for binding to KIRREL, wherein the antibody binds to human KIRREL or mouse KIRREL.

[0394] Provided herein is an antibody or an antigen binding fragment thereof that selectively binds to GRB10 interacting GYF protein 1, transcript variant X10 (GIGYF1) or a variant thereof, comprising at least one of: a variable heavy chain region, wherein the variable heavy chain region comprises a complementarity-determining region heavy chain 1 (CDR-H1) of SEQ ID NO: 760, CDR-H2 of SEQ ID NO: 1302, and CDR-H3 of SEQ ID NO: 1844; and/or a variable light chain region, wherein the variable light chain region comprises a complementarity-determining region light chain 1 (CDR-L1) of SEQ ID NO: 1031, CDR-L2 of SEQ ID NO: 1573, and CDR-L3 of SEQ ID NO: 2115. In some embodiments, the variable heavy chain comprises a polypeptide consensus sequence having at least 95% sequence identity to the amino acid sequence of SEQ ID NO: 218, and the variable light chain comprises a polypeptide consensus sequence having at least 95% sequence identity to the amino acid sequence of SEQ ID NO: 489. In some embodiments, the antibody or antigen binding fragment thereof binds a human GIGYF1, mouse GIGYF1, rat GIGYF1, bovine GIGYF1, or cynomolgus monkey GIGYF1. In some embodiments, the human GIGYF1 comprises a sequence of SEQ ID NO: 4496.

[0395] Provided herein is an antibody that competes with an antibody or antigen binding fragment of any one of claims 982-985 for binding to GIGYF1, wherein the antibody binds to human GIGYF1 or mouse GIGYF1.

[0396] Provided herein is an antibody or an antigen binding fragment thereof that selectively binds to defensin alpha 3 (DEFA3) or a variant thereof, comprising at least one of: a variable heavy chain region, wherein the variable heavy chain region comprises a complementarity-determining region heavy chain 1 (CDR-H1) of SEQ ID NO: 761, CDR-H2 of SEQ ID NO: 1303, and CDR-H3 of SEQ ID NO: 1845; and/or a variable light chain region, wherein the variable light chain region comprises a complementarity-determining region light chain 1 (CDR-L1) of SEQ ID NO: 1032, CDR-L2 of SEQ ID NO: 1574, and CDR-L3 of SEQ ID NO: 2116. In some embodiments, the variable heavy chain comprises a polypeptide consensus sequence having at least 95% sequence identity to the amino acid sequence of SEQ ID NO: 219, and the variable light chain comprises a polypeptide consensus sequence having at least 95% sequence identity to the amino acid sequence of SEQ ID NO: 490. In some embodiments, the antibody or antigen binding fragment thereof binds a human DEFA3, mouse DEFA3, rat DEFA3, bovine DEFA3, or cynomolgus monkey DEFA3. In some embodiments, the human DEFA3 comprises a sequence of SEQ ID NO: 4497.

[0397] Provided herein is an antibody that competes with an antibody or antigen binding fragment of any one of claims 987-990 for binding to DEFA3, wherein the antibody binds to human DEFA3 or mouse DEFA3.

[0398] Provided herein is an antibody or an antigen binding fragment thereof that selectively binds to radial spoke head 14 homolog (RSPH14) or a variant thereof, comprising at least one of: a variable heavy chain region, wherein the variable heavy chain region comprises a complementarity-determining region heavy chain 1 (CDR-H1) of SEQ ID NO: 762, CDR-H2 of SEQ ID NO: 1304, and CDR-H3 of SEQ ID NO: 1846; and/or a variable light chain region, wherein the variable light chain region comprises a complementarity-determining region light chain 1 (CDR-L1) of SEQ ID NO: 1033, CDR-L2 of SEQ ID NO: 1575, and CDR-L3 of SEQ ID NO: 2117. In some embodiments, the variable heavy chain comprises a polypeptide consensus sequence having at least 95% sequence identity to the amino acid sequence of SEQ ID NO: 220, and the variable light chain comprises a polypeptide consensus sequence having at least 95% sequence identity to the amino acid sequence of SEQ ID NO: 491. In some embodiments, the antibody or antigen binding fragment thereof binds a human RSPH14, mouse RSPH14, rat RSPH14, bovine RSPH14, or cynomolgus monkey RSPH14. In some embodiments, the human RSPH14 comprises a sequence of SEQ ID NO: 4498.

[0399] Provided herein is an antibody that competes with an antibody or antigen binding fragment of any one of claims 992-995 for binding to RSPH14, wherein the antibody binds to human RSPH14 or mouse RSPH14.

[0400] Provided herein is an antibody or an antigen binding fragment thereof that selectively binds to C—C motif chemokine ligand 2 (CCL2) or a variant thereof, comprising at least one of: a variable heavy chain region, wherein the variable heavy chain region comprises a complementarity-determining region heavy chain 1 (CDR-H1) of SEQ ID NO: 763, CDR-H2 of SEQ ID NO: 1305, and CDR-H3 of SEQ ID NO: 1847; and/or a variable light chain region, wherein the variable light chain region comprises a complementarity-determining region light chain 1 (CDR-L1) of SEQ ID NO: 1034, CDR-L2 of SEQ ID NO: 1576, and CDR-L3 of SEQ ID NO: 2118. In some embodiments, the variable heavy chain comprises a polypeptide consensus sequence having at least 95% sequence identity to the amino acid sequence of SEQ ID NO: 221, and the variable light chain comprises a polypeptide consensus sequence having at least 95% sequence identity to the amino acid sequence of SEQ ID NO: 492. In some embodiments, the antibody or antigen binding fragment thereof binds a human CCL2, mouse CCL2, rat CCL2, bovine CCL2, or cynomolgus monkey CCL2. In some embodiments, the human CCL2 comprises a sequence of SEQ ID NO: 4499.

[0401] Provided herein is an antibody that competes with an antibody or antigen binding fragment of any one of claims 997-1000 for binding to CCL2, wherein the antibody binds to human CCL2 or mouse CCL2.

[0402] Provided herein is an antibody or an antigen binding fragment thereof that selectively binds to killer cell lectin like receptor Cl, transcript variant 3 (KLRC1) or a variant thereof, comprising at least one of: a variable heavy chain region, wherein the variable heavy chain region comprises a complementarity-determining region heavy chain 1 (CDR-H1) of SEQ ID NO: 764, CDR-H2 of SEQ ID NO: 1306, and CDR-H3 of SEQ ID NO: 1848; and/or a variable light chain region, wherein the variable light chain region comprises a complementarity-determining region light chain 1 (CDR-L1) of SEQ ID NO: 1035, CDR-L2 of SEQ ID NO: 1577, and CDR-L3 of SEQ ID NO: 2119. In some embodiments, the variable heavy chain comprises a polypeptide consensus sequence having at least 95% sequence identity to the amino acid sequence of SEQ ID NO: 222, and the variable light chain comprises a polypeptide consensus sequence having at least 95% sequence identity to the amino acid sequence of SEQ ID NO: 493. In some embodiments, the antibody or antigen binding fragment thereof binds a human KLRC1, mouse KLRC1, rat KLRC1, bovine KLRC1, or cynomolgus monkey KLRC1. In some embodiments, the human KLRC1 comprises a sequence of SEQ ID NO: 4500.

[0403] Provided herein is an antibody that competes with an antibody or antigen binding fragment of any one of claims 1002-1005 for binding to KLRC1, wherein the antibody binds to human KLRC1 or mouse KLRC1.

[0404] Provided herein is an antibody that competes with an antibody or antigen binding fragment of kelch like family member 12, transcript variant 2 (KLHL12) or a variant thereof, comprising at least one of: a variable heavy chain region, wherein the variable heavy chain region comprises a complementarity-determining region heavy chain 1 (CDR-H1) of SEQ ID NO: 764, CDR-H2 of SEQ ID NO: 1306, and CDR-H3 of SEQ ID NO: 1848; and/or a variable light chain region, wherein the variable light chain region comprises a complementarity-determining region light chain 1 (CDR-L1) of SEQ ID NO: 1035, CDR-L2 of SEQ ID NO: 1577, and CDR-L3 of SEQ ID NO: 2119. In some embodiments, the variable heavy chain comprises a polypeptide consensus sequence having at least 95% sequence identity to the amino acid sequence of SEQ ID NO: 222, and the variable light chain comprises a polypeptide consensus sequence having at least 95% sequence identity to the amino acid sequence of SEQ ID NO: 493. In some embodiments, the antibody or antigen binding fragment thereof binds a human KLHL12, mouse KLHL12, rat KLHL12, bovine KLHL12, or cynomolgus monkey KLHL12. In some embodiments, the human KLHL12 comprises a sequence of SEQ ID NO: 4501.

[0405] Provided herein is an antibody that competes with an antibody or antigen binding fragment of any one of claims 1007-1010 for binding to KLHL12, wherein the antibody binds to human KLHL12 or mouse KLHL12.

[0406] Provided herein is an antibody or an antigen binding fragment thereof that selectively binds to neural retina leucine zipper, transcript variant X4 (NRL) or a variant thereof, comprising at least one of: a variable heavy chain region, wherein the variable heavy chain region comprises a complementarity-determining region heavy chain 1 (CDR-H1) of SEQ ID NO: 765, CDR-H2 of SEQ ID NO: 1307, and CDR-H3 of SEQ ID NO: 1849; and/or a variable light chain region, wherein the variable light chain region comprises a complementarity-determining region light chain 1 (CDR-L1) of SEQ ID NO: 1036, CDR-L2 of SEQ ID NO: 1578, and CDR-L3 of SEQ ID NO: 2120. In some embodiments, the variable heavy chain comprises a polypeptide consensus sequence having at least 95% sequence identity to the amino acid sequence of SEQ ID NO: 223, and the variable light chain comprises a polypeptide consensus sequence having at least 95% sequence identity to the amino acid sequence of SEQ ID NO: 494. In some embodiments, the antibody or antigen binding fragment thereof binds a human NRL, mouse NRL, rat NRL, bovine NRL, or cynomolgus monkey NRL. In some embodiments, the human NRL comprises a sequence of SEQ ID NO: 4502.

[0407] Provided herein is an antibody that competes with an antibody or antigen binding fragment of any one of claims 1012-1015 for binding to NRL, wherein the antibody binds to human NRL or mouse NRL.

[0408] Provided herein is an antibody or an antigen binding fragment thereof that selectively binds to phospholipase C delta 4 (PLCD4) or a variant thereof, comprising at least one of: a variable heavy chain region, wherein the variable heavy chain region comprises a complementarity-determining region heavy chain 1 (CDR-H1) of SEQ ID NO: 766, CDR-H2 of SEQ ID NO: 1308, and CDR-H3 of SEQ ID NO: 1850; and/or a variable light chain region, wherein the variable light chain region comprises a complementarity-determining region light chain 1 (CDR-L1) of SEQ ID NO: 1037, CDR-L2 of SEQ ID NO: 1579, and CDR-L3 of SEQ ID NO: 2121. In some embodiments, the variable heavy chain comprises a polypeptide consensus sequence having at least 95% sequence identity to the amino acid sequence of SEQ ID NO: 224, and the variable light chain comprises a polypeptide consensus sequence having at least 95% sequence identity to the amino acid sequence of SEQ ID NO: 495. In some embodiments, the antibody or antigen binding fragment thereof binds a human PLCD4, mouse PLCD4, rat PLCD4, bovine PLCD4, or cynomolgus monkey PLCD4. In some embodiments, the human PLCD4 comprises a sequence of SEQ ID NO: 4503.

[0409] Provided herein is an antibody that competes with an antibody or antigen binding fragment of any one of claims 1017-1020 for binding to PLCD4, wherein the antibody binds to human PLCD4 or mouse PLCD4.

[0410] Provided herein is an antibody or an antigen binding fragment thereof that selectively binds to coiled-coil domain containing 74B, transcript variant 2 (CCDC74B) or a variant thereof, comprising at least one of: a variable heavy chain region, wherein the variable heavy chain region comprises a complementarity-determining region heavy chain 1 (CDR-H1) of SEQ ID NO: 767, CDR-H2 of SEQ ID NO: 1309, and CDR-H3 of SEQ ID NO: 1851; and/or a variable light chain region, wherein the variable light chain region comprises a complementarity-determining region light chain 1 (CDR-L1) of SEQ ID NO: 1038, CDR-L2 of SEQ ID NO: 1580, and CDR-L3 of SEQ ID NO: 2122. In some embodiments, the variable heavy chain comprises a polypeptide consensus sequence having at least 95% sequence identity to the amino acid sequence of SEQ ID NO: 225, and the variable light chain comprises a polypeptide consensus sequence having at least 95% sequence identity to the amino acid sequence of SEQ ID NO: 496. In some embodiments, the antibody or antigen binding fragment thereof binds a human CCDC74B, mouse CCDC74B, rat CCDC74B, bovine CCDC74B, or cynomolgus monkey CCDC74B. In some embodiments, the human CCDC74B comprises a sequence of SEQ ID NO: 4504.

[0411] Provided herein is an antibody that competes with an antibody or antigen binding fragment of any one of claims 1022-1025 for binding to CCDC74B, wherein the antibody binds to human CCDC74B or mouse CCDC74B.

[0412] Provided herein is an antibody or an antigen binding fragment thereof that selectively binds to DEAD-box helicase 53 (DDX53) or a variant thereof, comprising at least one of: a variable heavy chain region, wherein the variable heavy chain region comprises a complementarity-determining region heavy chain 1 (CDR-H1) of SEQ ID NO: 768, CDR-H2 of SEQ ID NO: 1310, and CDR-H3 of SEQ ID NO: 1852; and/or a variable light chain region, wherein the variable light chain region comprises a complementarity-determining region light chain 1 (CDR-L1) of SEQ ID NO: 1039, CDR-L2 of SEQ ID NO: 1581, and CDR-L3 of SEQ ID NO: 2123. In some embodiments, the variable heavy chain comprises a polypeptide consensus sequence having at least 95% sequence identity to the amino acid sequence of SEQ ID NO: 226, and the variable light chain comprises a polypeptide consensus sequence having at least 95% sequence identity to the amino acid sequence of SEQ ID NO: 497. In some embodiments, the antibody or antigen binding fragment thereof binds a human DDX53, mouse DDX53, rat DDX53, bovine DDX53, or cynomolgus monkey DDX53. In some embodiments, the human DDX53 comprises a sequence of SEQ ID NO: 4477.

[0413] Provided herein is an antibody that competes with an antibody or antigen binding fragment of any one of claims 1027-1030 for binding to DDX53, wherein the antibody binds to human DDX53 or mouse DDX53.

[0414] Provided herein is an antibody or an antigen binding fragment thereof that selectively binds to HSPA (Hsp70) binding protein 1, transcript variant 2 (HSPBP1) or a variant thereof, comprising at least one of: a variable heavy chain region, wherein the variable heavy chain region comprises a complementarity-determining region heavy chain 1 (CDR-H1) of SEQ ID NO: 769, CDR-H2 of SEQ ID NO: 1311, and CDR-H3 of SEQ ID NO: 1853; and/or a variable light chain region, wherein the variable light chain region comprises a complementarity-determining region light chain 1 (CDR-L1) of SEQ ID NO: 1040, CDR-L2 of SEQ ID NO: 1582, and CDR-L3 of SEQ ID NO: 2124. In some embodiments, the variable heavy chain comprises a polypeptide consensus sequence having at least 95% sequence identity to the amino acid sequence of SEQ ID NO: 227, and the variable light chain comprises a polypeptide consensus sequence having at least 95% sequence identity to the amino acid sequence of SEQ ID NO: 498. In some embodiments, the antibody or antigen binding fragment thereof binds a human HSPBP1, mouse HSPBP1, rat HSPBP1, bovine HSPBP1, or cynomolgus monkey HSPBP1. In some embodiments, the human HSPBP1 comprises a sequence of SEQ ID NO: 4505.

[0415] Provided herein is an antibody that competes with an antibody or antigen binding fragment of any one of claims 1032-1035 for binding to HSPBP1, wherein the antibody binds to human HSPBP1 or mouse HSPBP1.

[0416] Provided herein is an antibody or an antigen binding fragment thereof that selectively binds to heat shock protein family A (Hsp70) member 2 (HSPA2) or a variant thereof, comprising at least one of: a variable heavy chain region, wherein the variable heavy chain region comprises a complementarity-determining region heavy chain 1 (CDR-H1) of SEQ ID NO: 769, CDR-H2 of SEQ ID NO: 1311, and CDR-H3 of SEQ ID NO: 1853; and/or a variable light chain region, wherein the variable light chain region comprises a complementarity-determining region light chain 1 (CDR-L1) of SEQ ID NO: 1040, CDR-L2 of SEQ ID NO: 1582, and CDR-L3 of SEQ ID NO: 2124. In some embodiments, the variable heavy chain comprises a polypeptide consensus sequence having at least 95% sequence identity to the amino acid sequence of SEQ ID NO: 227, and the variable light chain comprises a polypeptide consensus sequence having at least 95% sequence identity to the amino acid sequence of SEQ ID NO: 498. In some embodiments, the antibody or antigen binding fragment thereof binds a human HSPA2, mouse HSPA2, rat HSPA2, bovine HSPA2, or cynomolgus monkey HSPA2. In some embodiments, the human HSPA2 comprises a sequence of SEQ ID NO: 4506.

[0417] Provided herein is an antibody that competes with an antibody or antigen binding fragment of any one of claims 1037-1040 for binding to HSPA2, wherein the antibody binds to human HSPA2 or mouse HSPA2.

[0418] Provided herein is an antibody or an antigen binding fragment thereof that selectively binds to BCL2 associated athanogene 2 (BAG2) or a variant thereof, comprising at least one of: a variable heavy chain region, wherein the variable heavy chain region comprises a complementarity-determining region heavy chain 1 (CDR-H1) of SEQ ID NO: 769, CDR-H2 of SEQ ID NO: 1311, and CDR-H3 of SEQ ID NO: 1853; and/or a variable light chain region, wherein the variable light chain region comprises a complementarity-determining region light chain 1 (CDR-L1) of SEQ ID NO: 1040, CDR-L2 of SEQ ID NO: 1582, and CDR-L3 of SEQ ID NO: 2124. In some embodiments, the variable heavy chain comprises a polypeptide consensus sequence having at least 95% sequence identity to the amino acid sequence of SEQ ID NO: 227, and the variable light chain comprises a polypeptide consensus sequence having at least 95% sequence identity to the amino acid sequence of SEQ ID NO: 498. In some embodiments, the antibody or antigen binding fragment thereof binds a human BAG2, mouse BAG2, rat BAG2, bovine BAG2, or cynomolgus monkey BAG2. In some embodiments, the human BAG2 comprises a sequence of SEQ ID NO: 4507.

[0419] Provided herein is an antibody that competes with an antibody or antigen binding fragment of any one of claims 1042-1045 for binding to BAG2, wherein the antibody binds to human BAG2 or mouse BAG2.

[0420] Provided herein is an antibody or an antigen binding fragment thereof that selectively binds to C—X—C motif chemokine receptor 4, transcript variant 2 (CXCR4) or a variant thereof, comprising at least one of: a variable heavy chain region, wherein the variable heavy chain region comprises a complementarity-determining region heavy chain 1 (CDR-H1) of SEQ ID NO: 770, CDR-H2 of SEQ ID NO: 1312, and CDR-H3 of SEQ ID NO: 1854; and/or a variable light chain region, wherein the variable light chain region comprises a complementarity-determining region light chain 1 (CDR-L1) of SEQ ID NO: 1041, CDR-L2 of SEQ ID NO: 1583, and CDR-L3 of SEQ ID NO: 2125. In some embodiments, the variable heavy chain comprises a polypeptide consensus sequence having at least 95% sequence identity to the amino acid sequence of SEQ ID NO: 228, and the variable light chain comprises a polypeptide consensus sequence having at least 95% sequence identity to the amino acid sequence of SEQ ID NO: 499. In some embodiments, the antibody or antigen binding fragment thereof binds a human CXCR4, mouse CXCR4, rat CXCR4, bovine CXCR4, or cynomolgus monkey CXCR4. In some embodiments, the human CXCR4 comprises a sequence of SEQ ID NO: 4508.

[0421] Provided herein is an antibody that competes with an antibody or antigen binding fragment of any one of claims 1047-1050 for binding to CXCR4, wherein the antibody binds to human CXCR4 or mouse CXCR4.

[0422] Provided herein is an antibody or an antigen binding fragment thereof that selectively binds to Long intergenic non-protein coding rna 242 (LINC00242) or a variant thereof, comprising at least one of: a variable heavy chain region, wherein the variable heavy chain region comprises a complementarity-determining region heavy chain 1 (CDR-H1) of SEQ ID NO: 770, CDR-H2 of SEQ ID NO: 1312, and CDR-H3 of SEQ ID NO: 1854; and/or a variable light chain region, wherein the variable light chain region comprises a complementarity-determining region light chain 1 (CDR-L1) of SEQ ID NO: 1041, CDR-L2 of SEQ ID NO: 1583, and CDR-L3 of SEQ ID NO: 2125. In some embodiments, the variable heavy chain comprises a polypeptide consensus sequence having at least 95% sequence identity to the amino acid sequence of SEQ ID NO: 228, and the variable light chain comprises a polypeptide consensus sequence having at least 95% sequence identity to the amino acid sequence of SEQ ID NO: 499. In some embodiments, the antibody or antigen binding fragment thereof binds a human LINC00242, mouse LINC00242, rat LINC00242, bovine LINC00242, or cynomolgus monkey LINC00242. In some embodiments, the human LINC00242 comprises a sequence of SEQ ID NO: 4509.

[0423] Provided herein is an antibody that competes with an antibody or antigen binding fragment of any one of claims 1052-1055 for binding to LINC00242, wherein the antibody binds to human LINC00242 or mouse LINC00242.

[0424] Provided herein is an antibody or an antigen binding fragment thereof that selectively binds to signal transducer and activator of transcription 5A, transcript variant 2 (STATSA) or a variant thereof, comprising at least one of: a variable heavy chain region, wherein the variable heavy chain region comprises a complementarity-determining region heavy chain 1 (CDR-H1) of SEQ ID NO: 771, CDR-H2 of SEQ ID NO: 1313, and CDR-H3 of SEQ ID NO: 1855; and/or a variable light chain region, wherein the variable light chain region comprises a complementarity-determining region light chain 1 (CDR-L1) of SEQ ID NO: 1042, CDR-L2 of SEQ ID NO: 1584, and CDR-L3 of SEQ ID NO: 2126. In some embodiments, the variable heavy chain comprises a polypeptide consensus sequence having at least 95% sequence identity to the amino acid sequence of SEQ ID NO: 229, and the variable light chain comprises a polypeptide consensus sequence having at least 95% sequence identity to the amino acid sequence of SEQ ID NO: 500. In some embodiments, the antibody or antigen binding fragment thereof binds a human STATSA, mouse STATSA, rat STATSA, bovine STATSA, or cynomolgus monkey STATSA. In some embodiments, the human STATSA comprises a sequence of SEQ ID NO: 4510.

[0425] Provided herein is an antibody that competes with an antibody or antigen binding fragment of any one of claims 1057-1060 for binding to STATSA, wherein the antibody binds to human STATSA or mouse STATSA.

[0426] Provided herein is an antibody or an antigen binding fragment thereof that selectively binds to quinoid dihydropteridine reductase, transcript variant 1 (QDPR) or a variant thereof, comprising at least one of: a variable heavy chain region, wherein the variable heavy chain region comprises a complementarity-determining region heavy chain 1 (CDR-H1) of SEQ ID NO: 771, CDR-H2 of SEQ ID NO: 1313, and CDR-H3 of SEQ ID NO: 1855; and/or a variable light chain region, wherein the variable light chain region comprises a complementarity-determining region light chain 1 (CDR-L1) of SEQ ID NO: 1042, CDR-L2 of SEQ ID NO: 1584, and CDR-L3 of SEQ ID NO: 2126. In some embodiments, the variable heavy chain comprises a polypeptide consensus sequence having at least 95% sequence identity to the amino acid sequence of SEQ ID NO: 229, and the variable light chain comprises a polypeptide consensus sequence having at least 95% sequence identity to the amino acid sequence of SEQ ID NO: 500. In some embodiments, the antibody or antigen binding fragment thereof binds a human QDPR, mouse QDPR, rat QDPR, bovine QDPR, or cynomolgus monkey QDPR. In some embodiments, the human QDPR comprises a sequence of SEQ ID NO: 4438.

[0427] Provided herein is an antibody that competes with an antibody or antigen binding fragment of any one of claims 1062-1065 for binding to QDPR, wherein the antibody binds to human QDPR or mouse QDPR.

[0428] Provided herein is an antibody or an antigen binding fragment thereof that selectively binds to calcium and integrin binding 1, transcript variant b (CIB1) or a variant thereof, comprising at least one of: a variable heavy chain region, wherein the variable heavy chain region comprises a complementarity-determining region heavy chain 1 (CDR-H1) of SEQ ID NO: 773, CDR-H2 of SEQ ID NO: 1315, and CDR-H3 of SEQ ID NO: 1857; and/or a variable light chain region, wherein the variable light chain region comprises a complementarity-determining region light chain 1 (CDR-L1) of SEQ ID NO: 1044, CDR-L2 of SEQ ID NO: 1586, and CDR-L3 of SEQ ID NO: 2128. In some embodiments, the variable heavy chain comprises a polypeptide consensus sequence having at least 95% sequence identity to the amino acid sequence of SEQ ID NO: 231, and the variable light chain comprises a polypeptide consensus sequence having at least 95% sequence identity to the amino acid sequence of SEQ ID NO: 502. In some embodiments, the antibody or antigen binding fragment thereof binds a human CIB1, mouse CIB1, rat CIB1, bovine CIB1, or cynomolgus monkey CIB1. In some embodiments, the human CIB1 comprises a sequence of SEQ ID NO: 4511.

[0429] Provided herein is an antibody that competes with an antibody or antigen binding fragment of any one of claims 1067-1070 for binding to CIB1, wherein the antibody binds to human CIB1 or mouse CIB1.

[0430] Provided herein is an antibody or an antigen binding fragment thereof that selectively binds to t-SNARE domain containing 1, transcript variant 1 (TSNARE1) or a variant thereof, comprising at least one of: a variable heavy chain region, wherein the variable heavy chain region comprises a complementarity-determining region heavy chain 1 (CDR-H1) of SEQ ID NO: 773, CDR-H2 of SEQ ID NO: 1315, and CDR-H3 of SEQ ID NO: 1857; and/or a variable light chain region, wherein the variable light chain region comprises a complementarity-determining region light chain 1 (CDR-L1) of SEQ ID NO: 1044, CDR-L2 of SEQ ID NO: 1586, and CDR-L3 of SEQ ID NO: 2128. In some embodiments, the variable heavy chain comprises a polypeptide consensus sequence having at least 95% sequence identity to the amino acid sequence of SEQ ID NO: 231, and the variable light chain comprises a polypeptide consensus sequence having at least 95% sequence identity to the amino acid sequence of SEQ ID NO: 502. In some embodiments, the antibody or antigen binding fragment thereof binds a human TSNARE1, mouse TSNARE1, rat TSNARE1, bovine TSNARE1, or cynomolgus monkey TSNARE1. In some embodiments, the human TSNARE1 comprises a sequence of SEQ ID NO: 4512.

[0431] Provided herein is an antibody that competes with an antibody or antigen binding fragment of any one of claims 1072-1075 for binding to TSNARE1, wherein the antibody binds to human TSNARE1 or mouse TSNARE1.

[0432] Provided herein is an antibody or an antigen binding fragment thereof that selectively binds to HAUS augmin like complex subunit 1, transcript variant 1 (HAUS1) or a variant thereof, comprising at least one of: a variable heavy chain region, wherein the variable heavy chain region comprises a complementarity-determining region heavy chain 1 (CDR-H1) of SEQ ID NO: 774, CDR-H2 of SEQ ID NO: 1316, and CDR-H3 of SEQ ID NO: 1858; and/or a variable light chain region, wherein the variable light chain region comprises a complementarity-determining region light chain 1 (CDR-L1) of SEQ ID NO: 1045, CDR-L2 of SEQ ID NO: 1587, and CDR-L3 of SEQ ID NO: 2129. In some embodiments, the variable heavy chain comprises a polypeptide consensus sequence having at least 95% sequence identity to the amino acid sequence of SEQ ID NO: 232, and the variable light chain comprises a polypeptide consensus sequence having at least 95% sequence identity to the amino acid sequence of SEQ ID NO: 503. In some embodiments, the antibody or antigen binding fragment thereof binds a human HAUS1, mouse HAUS1, rat HAUS1, bovine HAUS1, or cynomolgus monkey HAUS1. In some embodiments, the human HAUS1 comprises a sequence of SEQ ID NO: 4513.

[0433] Provided herein is an antibody that competes with an antibody or antigen binding fragment of any one of claims 1077-1080 for binding to HAUS1, wherein the antibody binds to human HAUS1 or mouse HAUS1.

[0434] Provided herein is an antibody or an antigen binding fragment thereof that selectively binds to DPY30 domain containing 1, transcript variant X4 (DYDC1) or a variant thereof, comprising at least one of: a variable heavy chain region, wherein the variable heavy chain region comprises a complementarity-determining region heavy chain 1 (CDR-H1) of SEQ ID NO: 774, CDR-H2 of SEQ ID NO: 1316, and CDR-H3 of SEQ ID NO: 1858; and/or a variable light chain region, wherein the variable light chain region comprises a complementarity-determining region light chain 1 (CDR-L1) of SEQ ID NO: 1045, CDR-L2 of SEQ ID NO: 1587, and CDR-L3 of SEQ ID NO: 2129. In some embodiments, the variable heavy chain comprises a polypeptide consensus sequence having at least 95% sequence identity to the amino acid sequence of SEQ ID NO: 232, and the variable light chain comprises a polypeptide consensus sequence having at least 95% sequence identity to the amino acid sequence of SEQ ID NO: 503. In some embodiments, the antibody or antigen binding fragment thereof binds a human DYDC1, mouse DYDC1, rat DYDC1, bovine DYDC1, or cynomolgus monkey DYDC1. In some embodiments, the human DYDC1 comprises a sequence of SEQ ID NO: 4514.

[0435] Provided herein is an antibody that competes with an antibody or antigen binding fragment of any one of claims 1082-1085 for binding to DYDC1, wherein the antibody binds to human DYDC1 or mouse DYDC1.

[0436] Provided herein is an antibody or an antigen binding fragment thereof that selectively binds to Transforming growth factor beta 3 (TGFB3) or a variant thereof, comprising at least one of: a variable heavy chain region, wherein the variable heavy chain region comprises a complementarity-determining region heavy chain 1 (CDR-H1) of SEQ ID NO: 775, CDR-H2 of SEQ ID NO: 1317, and CDR-H3 of SEQ ID NO: 1859; and/or a variable light chain region, wherein the variable light chain region comprises a complementarity-determining region light chain 1 (CDR-L1) of SEQ ID NO: 1046, CDR-L2 of SEQ ID NO: 1588, and CDR-L3 of SEQ ID NO: 2130. In some embodiments, the variable heavy chain comprises a polypeptide consensus sequence having at least 95% sequence identity to the amino acid sequence of SEQ ID NO: 233, and the variable light chain comprises a polypeptide consensus sequence having at least 95% sequence identity to the amino acid sequence of SEQ ID NO: 504. In some embodiments, the antibody or antigen binding fragment thereof binds a human TGFB3, mouse TGFB3, rat TGFB3, bovine TGFB3, or cynomolgus monkey TGFB3. In some embodiments, the human TGFB3 comprises a sequence of SEQ ID NO: 4515.

[0437] Provided herein is an antibody that competes with an antibody or antigen binding fragment of any one of claims 1087-1090 for binding to TGFB3, wherein the antibody binds to human TGFB3 or mouse TGFB3.

[0438] Provided herein is an antibody or an antigen binding fragment thereof that selectively binds to chymotrypsinogen B2 (CTRB2) or a variant thereof, comprising at least one of: a variable heavy chain region, wherein the variable heavy chain region comprises a complementarity-determining region heavy chain 1 (CDR-H1) of SEQ ID NO: 776, CDR-H2 of SEQ ID NO: 1318, and CDR-H3 of SEQ ID NO: 1860; and/or a variable light chain region, wherein the variable light chain region comprises a complementarity-determining region light chain 1 (CDR-L1) of SEQ ID NO: 1047, CDR-L2 of SEQ ID NO: 1589, and CDR-L3 of SEQ ID NO: 2131. In some embodiments, the variable heavy chain comprises a polypeptide consensus sequence having at least 95% sequence identity to the amino acid sequence of SEQ ID NO: 234, and the variable light chain comprises a polypeptide consensus sequence having at least 95% sequence identity to the amino acid sequence of SEQ ID NO: 505. In some embodiments, the antibody or antigen binding fragment thereof binds a human CTRB2, mouse CTRB2, rat CTRB2, bovine CTRB2, or cynomolgus monkey CTRB2. In some embodiments, the human CTRB2 comprises a sequence of SEQ ID NO: 4516.

[0439] Provided herein is an antibody that competes with an antibody or antigen binding fragment of any one of claims 1092-1095 for binding to CTRB2, wherein the antibody binds to human CTRB2 or mouse CTRB2. Provided herein is an antibody or an antigen binding fragment thereof that selectively binds to NFKB inhibitor beta, transcript variant 1 (NFKBIB) or a variant thereof, comprising at least one of: a variable heavy chain region, wherein the variable heavy chain region comprises a complementarity-determining region heavy chain 1 (CDR-H1) of SEQ ID NO: 777, CDR-H2 of SEQ ID NO: 1319, and CDR-H3 of SEQ ID NO: 1861; and/or a variable light chain region, wherein the variable light chain region comprises a complementarity-determining region light chain 1 (CDR-L1) of SEQ ID NO: 1048, CDR-L2 of SEQ ID NO: 1590, and CDR-L3 of SEQ ID NO: 2132. In some embodiments, the variable heavy chain comprises a polypeptide consensus sequence having at least 95% sequence identity to the amino acid sequence of SEQ ID NO: 235, and the variable light chain comprises a polypeptide consensus sequence having at least 95% sequence identity to the amino acid sequence of SEQ ID NO: 506.

[0440] In some embodiments, the antibody or antigen binding fragment thereof binds a human NFKBIB, mouse NFKBIB, rat NFKBIB, bovine NFKBIB, or cynomolgus monkey NFKBIB. In some embodiments, the human NFKBIB comprises a sequence of SEQ ID NO: 4517.

[0441] Provided herein is an antibody that competes with an antibody or antigen binding fragment of any one of claims 1097-1100 for binding to NFKBIB, wherein the antibody binds to human NFKBIB or mouse NFKBIB.

[0442] Provided herein is an antibody or an antigen binding fragment thereof that selectively binds to cyclin dependent kinase 2 associated protein 2, transcript variant 1 (CDK2AP2) or a variant thereof, comprising at least one of: a variable heavy chain region, wherein the variable heavy chain region comprises a complementarity-determining region heavy chain 1 (CDR-H1) of SEQ ID NO: 777, CDR-H2 of SEQ ID NO: 1319, and CDR-H3 of SEQ ID NO: 1861; and/or a variable light chain region, wherein the variable light chain region comprises a complementarity-determining region light chain 1 (CDR-L1) of SEQ ID NO: 1048, CDR-L2 of SEQ ID NO: 1590, and CDR-L3 of SEQ ID NO: 2132. In some embodiments, the variable heavy chain comprises a polypeptide consensus sequence having at least 95% sequence identity to the amino acid sequence of SEQ ID NO: 235, and the variable light chain comprises a polypeptide consensus sequence having at least 95% sequence identity to the amino acid sequence of SEQ ID NO: 506. In some embodiments, the antibody or antigen binding fragment thereof binds a human CDK2AP2, mouse CDK2AP2, rat CDK2AP2, bovine CDK2AP2, or cynomolgus monkey CDK2AP2. In some embodiments, the human CDK2AP2 comprises a sequence of SEQ ID NO: 4518.

[0443] Provided herein is an antibody that competes with an antibody or antigen binding fragment of any one of claims 1102-1105 for binding to CDK2AP2, wherein the antibody binds to human CDK2AP2 or mouse CDK2AP2.

[0444] Provided herein is an antibody or an antigen binding fragment thereof that selectively binds to lipase family member N, transcript variant X1 (LIPN) or a variant thereof, comprising at least one of: a variable heavy chain region, wherein the variable heavy chain region comprises a complementarity-determining region heavy chain 1 (CDR-H1) of SEQ ID NO: 778, CDR-H2 of SEQ ID NO: 1320, and CDR-H3 of SEQ ID NO: 1862; and/or a variable light chain region, wherein the variable light chain region comprises a complementarity-determining region light chain 1 (CDR-L1) of SEQ ID NO: 1049, CDR-L2 of SEQ ID NO: 1591, and CDR-L3 of SEQ ID NO: 2133. In some embodiments, the variable heavy chain comprises a polypeptide consensus sequence having at least 95% sequence identity to the amino acid sequence of SEQ ID NO: 236, and the variable light chain comprises a polypeptide consensus sequence having at least 95% sequence identity to the amino acid sequence of SEQ ID NO: 507. In some embodiments, the antibody or antigen binding fragment thereof binds a human LIPN, mouse LIPN, rat LIPN, bovine LIPN, or cynomolgus monkey LIPN. In some embodiments, the human LIPN comprises a sequence of SEQ ID NO: 4519.

[0445] Provided herein is an antibody that competes with an antibody or antigen binding fragment of any one of claims 1107-1110 for binding to LIPN, wherein the antibody binds to human LIPN or mouse LIPN.

[0446] Provided herein is an antibody or an antigen binding fragment thereof that selectively binds to regulator of G protein signaling 14, transcript variant 1 (RGS14) or a variant thereof, comprising at least one of: a variable heavy chain region, wherein the variable heavy chain region comprises a complementarity-determining region heavy chain 1 (CDR-H1) of SEQ ID NO: 779, CDR-H2 of SEQ ID NO: 1321, and CDR-H3 of SEQ ID NO: 1863; and/or a variable light chain region, wherein the variable light chain region comprises a complementarity-determining region light chain 1 (CDR-L1) of SEQ ID NO: 1050, CDR-L2 of SEQ ID NO: 1592, and CDR-L3 of SEQ ID NO: 2134. In some embodiments, the variable heavy chain comprises a polypeptide consensus sequence having at least 95% sequence identity to the amino acid sequence of SEQ ID NO: 237, and the variable light chain comprises a polypeptide consensus sequence having at least 95% sequence identity to the amino acid sequence of SEQ ID NO: 508. In some embodiments, the antibody or antigen binding fragment thereof binds a human RGS14, mouse RGS14, rat RGS14, bovine RGS14, or cynomolgus monkey RGS14. In some embodiments, the human RGS14 comprises a sequence of SEQ ID NO: 4520.

[0447] Provided herein is an antibody that competes with an antibody or antigen binding fragment of any one of claims 1112-1115 for binding to RGS14, wherein the antibody binds to human RGS14 or mouse RGS14.

[0448] Provided herein is an antibody or an antigen binding fragment thereof that selectively binds to leucine rich repeat containing 14, transcript variant 1 (LRRC14) or a variant thereof, comprising at least one of: a variable heavy chain region, wherein the variable heavy chain region comprises a complementarity-determining region heavy chain 1 (CDR-H1) of SEQ ID NO: 779, CDR-H2 of SEQ ID NO: 1321, and CDR-H3 of SEQ ID NO: 1863; and/or a variable light chain region, wherein the variable light chain region comprises a complementarity-determining region light chain 1 (CDR-L1) of SEQ ID NO: 1050, CDR-L2 of SEQ ID NO: 1592, and CDR-L3 of SEQ ID NO: 2134. In some embodiments, the variable heavy chain comprises a polypeptide consensus sequence having at least 95% sequence identity to the amino acid sequence of SEQ ID NO: 237, and the variable light chain comprises a polypeptide consensus sequence having at least 95% sequence identity to the amino acid sequence of SEQ ID NO: 508. In some embodiments, the antibody or antigen binding fragment thereof binds a human LRRC14, mouse LRRC14, rat LRRC14, bovine LRRC14, or cynomolgus monkey LRRC14. In some embodiments, the human LRRC14 comprises a sequence of SEQ ID NO: 4521.

[0449] Provided herein is an antibody that competes with an antibody or antigen binding fragment of any one of claims 1117-1120 for binding to LRRC14, wherein the antibody binds to human LRRC14 or mouse LRRC14.

[0450] Provided herein is an antibody or an antigen binding fragment thereof that selectively binds to transforming growth factor beta induced (TGFBI) or a variant thereof, comprising at least one of: a variable heavy chain region, wherein the variable heavy chain region comprises a complementarity-determining region heavy chain 1 (CDR-H1) of SEQ ID NO: 780, CDR-H2 of SEQ ID NO: 1322, and CDR-H3 of SEQ ID NO: 1864; and/or a variable light chain region, wherein the variable light chain region comprises a complementarity-determining region light chain 1 (CDR-L1) of SEQ ID NO: 1051, CDR-L2 of SEQ ID NO: 1593, and CDR-L3 of SEQ ID NO: 2135. In some embodiments, the variable heavy chain comprises a polypeptide consensus sequence having at least 95% sequence identity to the amino acid sequence of SEQ ID NO: 238, and the variable light chain comprises a polypeptide consensus sequence having at least 95% sequence identity to the amino acid sequence of SEQ ID NO: 509. In some embodiments, the antibody or antigen binding fragment thereof binds a human TGFBI, mouse TGFBI, rat TGFBI, bovine TGFBI, or cynomolgus monkey TGFBI. In some embodiments, the human TGFBI comprises a sequence of SEQ ID NO: 4522.

[0451] Provided herein is an antibody that competes with an antibody or antigen binding fragment of any one of claims 1122-1125 for binding to TGFBI, wherein the antibody binds to human TGFBI or mouse TGFBI.

[0452] Provided herein is an antibody or an antigen binding fragment thereof that selectively binds to BCL2 apoptosis regulator, transcript variant alpha (BCL2) or a variant thereof, comprising at least one of: a variable heavy chain region, wherein the variable heavy chain region comprises a complementarity-determining region heavy chain 1 (CDR-H1) of SEQ ID NO: 782, CDR-H2 of SEQ ID NO: 1324, and CDR-H3 of SEQ ID NO: 1866; and/or a variable light chain region, wherein the variable light chain region comprises a complementarity-determining region light chain 1 (CDR-L1) of SEQ ID NO: 1053, CDR-L2 of SEQ ID NO: 1595, and CDR-L3 of SEQ ID NO: 2137. In some embodiments, the variable heavy chain comprises a polypeptide consensus sequence having at least 95% sequence identity to the amino acid sequence of SEQ ID NO: 240, and the variable light chain comprises a polypeptide consensus sequence having at least 95% sequence identity to the amino acid sequence of SEQ ID NO: 511. In some embodiments, the antibody or antigen binding fragment thereof binds a human BCL2, mouse BCL2, rat BCL2, bovine BCL2, or cynomolgus monkey BCL2. In some embodiments, the human BCL2 comprises a sequence of SEQ ID NO: 4523.

[0453] Provided herein is an antibody that competes with an antibody or antigen binding fragment of any one of claims 1127-1130 for binding to BCL2, wherein the antibody binds to human BCL2 or mouse BCL2.

[0454] Provided herein is an antibody or an antigen binding fragment thereof that selectively binds to DIX domain containing 1, transcript variant 2 (DIXDC1) or a variant thereof, comprising at least one of: a variable heavy chain region, wherein the variable heavy chain region comprises a complementarity-determining region heavy chain 1 (CDR-H1) of SEQ ID NO: 783, CDR-H2 of SEQ ID NO: 1325, and CDR-H3 of SEQ ID NO: 1867; and/or a variable light chain region, wherein the variable light chain region comprises a complementarity-determining region light chain 1 (CDR-L1) of SEQ ID NO: 1054, CDR-L2 of SEQ ID NO: 1596, and CDR-L3 of SEQ ID NO: 2138. In some embodiments, the variable heavy chain comprises a polypeptide consensus sequence having at least 95% sequence identity to the amino acid sequence of SEQ ID NO: 241, and the variable light chain comprises a polypeptide consensus sequence having at least 95% sequence identity to the amino acid sequence of SEQ ID NO: 512. In some embodiments, the antibody or antigen binding fragment thereof binds a human DIXDC1, mouse DIXDC1, rat DIXDC1, bovine DIXDC1, or cynomolgus monkey DIXDC1. In some embodiments, the human DIXDC1 comprises a sequence of SEQ ID NO: 4524.

[0455] Provided herein is an antibody that competes with an antibody or antigen binding fragment of any one of claims 1132-1135 for binding to DIXDC1, wherein the antibody binds to human DIXDC1 or mouse DIXDC1.

[0456] Provided herein is an antibody or an antigen binding fragment thereof that selectively binds to Caspase 8 (CASP8) or a variant thereof, comprising at least one of: a variable heavy chain region, wherein the variable heavy chain region comprises a complementarity-determining region heavy chain 1 (CDR-H1) of SEQ ID NO: 784, CDR-H2 of SEQ ID NO: 1326, and CDR-H3 of SEQ ID NO: 1868; and/or a variable light chain region, wherein the variable light chain region comprises a complementarity-determining region light chain 1 (CDR-L1) of SEQ ID NO: 1055, CDR-L2 of SEQ ID NO: 1597, and CDR-L3 of SEQ ID NO: 2139. In some embodiments, the variable heavy chain comprises a polypeptide consensus sequence having at least 95% sequence identity to the amino acid sequence of SEQ ID NO: 242, and the variable light chain comprises a polypeptide consensus sequence having at least 95% sequence identity to the amino acid sequence of SEQ ID NO: 513. In some embodiments, the antibody or antigen binding fragment thereof binds a human CASP8, mouse CASP8, rat CASP8, bovine CASP8, or cynomolgus monkey CASP8. In some embodiments, the human CASP8 comprises a sequence of SEQ ID NO: 4525.

[0457] Provided herein is an antibody that competes with an antibody or antigen binding fragment of any one of claims 1137-1140 for binding to CASP8, wherein the antibody binds to human CASP8 or mouse CASP8.

[0458] Provided herein is an antibody or an antigen binding fragment thereof that selectively binds to phosphoglucomutase 2 like 1 (PGM2L1) or a variant thereof, comprising at least one of: a variable heavy chain region, wherein the variable heavy chain region comprises a complementarity-determining region heavy chain 1 (CDR-H1) of SEQ ID NO: 784, CDR-H2 of SEQ ID NO: 1326, and CDR-H3 of SEQ ID NO: 1868; and/or a variable light chain region, wherein the variable light chain region comprises a complementarity-determining region light chain 1 (CDR-L1) of SEQ ID NO: 1055, CDR-L2 of SEQ ID NO: 1597, and CDR-L3 of SEQ ID NO: 2139. In some embodiments, the variable heavy chain comprises a polypeptide consensus sequence having at least 95% sequence identity to the amino acid sequence of SEQ ID NO: 242, and the variable light chain comprises a polypeptide consensus sequence having at least 95% sequence identity to the amino acid sequence of SEQ ID NO: 513. In some embodiments, the antibody or antigen binding fragment thereof binds a human PGM2L1, mouse PGM2L1, rat PGM2L1, bovine PGM2L1, or cynomolgus monkey PGM2L1. In some embodiments, the human PGM2L1 comprises a sequence of SEQ ID NO: 4526.

[0459] Provided herein is an antibody that competes with an antibody or antigen binding fragment of any one of claims 1142-1145 for binding to PGM2L1, wherein the antibody binds to human PGM2L1 or mouse PGM2L1.

[0460] Provided herein is an antibody or an antigen binding fragment thereof that selectively binds to programmed cell death 1 (PDCD1) or a variant thereof, comprising at least one of: a variable heavy chain region, wherein the variable heavy chain region comprises a complementarity-determining region heavy chain 1 (CDR-H1) of SEQ ID NO: 785, CDR-H2 of SEQ ID NO: 1327, and CDR-H3 of SEQ ID NO: 1869; and/or a variable light chain region, wherein the variable light chain region comprises a complementarity-determining region light chain 1 (CDR-L1) of SEQ ID NO: 1056, CDR-L2 of SEQ ID NO: 1598, and CDR-L3 of SEQ ID NO: 2140. In some embodiments, the variable heavy chain comprises a polypeptide consensus sequence having at least 95% sequence identity to the amino acid sequence of SEQ ID NO: 243, and the variable light chain comprises a polypeptide consensus sequence having at least 95% sequence identity to the amino acid sequence of SEQ ID NO: 514. In some embodiments, the antibody or antigen binding fragment thereof binds a human PDCD1, mouse PDCD1, rat PDCD1, bovine PDCD1, or cynomolgus monkey PDCD1. In some embodiments, the human PDCD1 comprises a sequence of SEQ ID NO: 4527.

[0461] Provided herein is an antibody that competes with an antibody or antigen binding fragment of any one of claims 1147-1150 for binding to PDCD1, wherein the antibody binds to human PDCD1 or mouse PDCD1.

[0462] Provided herein is an antibody or an antigen binding fragment thereof that selectively binds to glyoxylate and hydroxypyruvate reductase (GRHPR) or a variant thereof, comprising at least one of: a variable heavy chain region, wherein the variable heavy chain region comprises a complementarity-determining region heavy chain 1 (CDR-H1) of SEQ ID NO: 786, CDR-H2 of SEQ ID NO: 1328, and CDR-H3 of SEQ ID NO: 1870; and/or a variable light chain region, wherein the variable light chain region comprises a complementarity-determining region light chain 1 (CDR-L1) of SEQ ID NO: 1057, CDR-L2 of SEQ ID NO: 1599, and CDR-L3 of SEQ ID NO: 2141. In some embodiments, the variable heavy chain comprises a polypeptide consensus sequence having at least 95% sequence identity to the amino acid sequence of SEQ ID NO: 244, and the variable light chain comprises a polypeptide consensus sequence having at least 95% sequence identity to the amino acid sequence of SEQ ID NO: 515. In some embodiments, the antibody or antigen binding fragment thereof binds a human GRHPR, mouse GRHPR, rat GRHPR, bovine GRHPR, or cynomolgus monkey GRHPR. In some embodiments, the human GRHPR comprises a sequence of SEQ ID NO: 4528.

[0463] Provided herein is an antibody that competes with an antibody or antigen binding fragment of any one of claims 1152-1155 for binding to GRHPR, wherein the antibody binds to human GRHPR or mouse GRHPR.

[0464] Provided herein is an antibody or an antigen binding fragment thereof that selectively binds to Cytochrome b5 reductase 2 (CYB5R2) or a variant thereof, comprising at least one of: a variable heavy chain region, wherein the variable heavy chain region comprises a complementarity-determining region heavy chain 1 (CDR-H1) of SEQ ID NO: 787, CDR-H2 of SEQ ID NO: 1329, and CDR-H3 of SEQ ID NO: 1871; and/or a variable light chain region, wherein the variable light chain region comprises a complementarity-determining region light chain 1 (CDR-L1) of SEQ ID NO: 1058, CDR-L2 of SEQ ID NO: 1600, and CDR-L3 of SEQ ID NO: 2142. In some embodiments, the variable heavy chain comprises a polypeptide consensus sequence having at least 95% sequence identity to the amino acid sequence of SEQ ID NO: 245, and the variable light chain comprises a polypeptide consensus sequence having at least 95% sequence identity to the amino acid sequence of SEQ ID NO: 516. In some embodiments, the antibody or antigen binding fragment thereof binds a human CYB5R2, mouse CYB5R2, rat CYB5R2, bovine CYB5R2, or cynomolgus monkey CYB5R2. In some embodiments, the human CYB5R2 comprises a sequence of SEQ ID NO: 4529.

[0465] Provided herein is an antibody that competes with an antibody or antigen binding fragment of any one of claims 1157-1160 for binding to CYB5R2, wherein the antibody binds to human CYB5R2 or mouse CYB5R2.

[0466] Provided herein is an antibody or an antigen binding fragment thereof that selectively binds to acyl-CoA binding domain containing 6 (ACBD6) or a variant thereof, comprising at least one of: a variable heavy chain region, wherein the variable heavy chain region comprises a complementarity-determining region heavy chain 1 (CDR-H1) of SEQ ID NO: 788, CDR-H2 of SEQ ID NO: 1330, and CDR-H3 of SEQ ID NO: 1872; and/or a variable light chain region, wherein the variable light chain region comprises a complementarity-determining region light chain 1 (CDR-L1) of SEQ ID NO: 1059, CDR-L2 of SEQ ID NO: 1601, and CDR-L3 of SEQ ID NO: 2143. In some embodiments, the variable heavy chain comprises a polypeptide consensus sequence having at least 95% sequence identity to the amino acid sequence of SEQ ID NO: 246, and the variable light chain comprises a polypeptide consensus sequence having at least 95% sequence identity to the amino acid sequence of SEQ ID NO: 517. In some embodiments, the antibody or antigen binding fragment thereof binds a human ACBD6, mouse ACBD6, rat ACBD6, bovine ACBD6, or cynomolgus monkey ACBD6. In some embodiments, the human ACBD6 comprises a sequence of SEQ ID NO: 4530.

[0467] Provided herein is an antibody that competes with an antibody or antigen binding fragment of any one of claims 1162-1165 for binding to ACBD6, wherein the antibody binds to human ACBD6 or mouse ACBD6.

[0468] Provided herein is an antibody or an antigen binding fragment thereof that selectively binds to phosducin like (PDCL) or a variant thereof, comprising at least one of: a variable heavy chain region, wherein the variable heavy chain region comprises a complementarity-determining region heavy chain 1 (CDR-H1) of SEQ ID NO: 789, CDR-H2 of SEQ ID NO: 1331, and CDR-H3 of SEQ ID NO: 1873; and/or a variable light chain region, wherein the variable light chain region comprises a complementarity-determining region light chain 1 (CDR-L1) of SEQ ID NO: 1060, CDR-L2 of SEQ ID NO: 1602, and CDR-L3 of SEQ ID NO: 2144. In some embodiments, the variable heavy chain comprises a polypeptide consensus sequence having at least 95% sequence identity to the amino acid sequence of SEQ ID NO: 247, and the variable light chain comprises a polypeptide consensus sequence having at least 95% sequence identity to the amino acid sequence of SEQ ID NO: 518. In some embodiments, the antibody or antigen binding fragment thereof binds a human PDCL, mouse PDCL, rat PDCL, bovine PDCL, or cynomolgus monkey PDCL. In some embodiments, the human PDCL comprises a sequence of SEQ ID NO: 4531.

[0469] Provided herein is an antibody that competes with an antibody or antigen binding fragment of any one of claims 1167-1170 for binding to PDCL, wherein the antibody binds to human PDCL or mouse PDCL.

[0470] Provided herein is an antibody or an antigen binding fragment thereof that selectively binds to Dexd-box helicase 52 (DDX52) or a variant thereof, comprising at least one of: a variable heavy chain region, wherein the variable heavy chain region comprises a complementarity-determining region heavy chain 1 (CDR-H1) of SEQ ID NO: 790, CDR-H2 of SEQ ID NO: 1332, and CDR-H3 of SEQ ID NO: 1874; and/or a variable light chain region, wherein the variable light chain region comprises a complementarity-determining region light chain 1 (CDR-L1) of SEQ ID NO: 1061, CDR-L2 of SEQ ID NO: 1603, and CDR-L3 of SEQ ID NO: 2145. In some embodiments, the variable heavy chain comprises a polypeptide consensus sequence having at least 95% sequence identity to the amino acid sequence of SEQ ID NO: 248, and the variable light chain comprises a polypeptide consensus sequence having at least 95% sequence identity to the amino acid sequence of SEQ ID NO: 519. In some embodiments, the antibody or antigen binding fragment thereof binds a human DDX52, mouse DDX52, rat DDX52, bovine DDX52, or cynomolgus monkey DDX52. In some embodiments, the human DDX52 comprises a sequence of SEQ ID NO: 4532.

[0471] Provided herein is an antibody that competes with an antibody or antigen binding fragment of any one of claims 1172-1175 for binding to DDX52, wherein the antibody binds to human DDX52 or mouse DDX52.

[0472] Provided herein is an antibody or an antigen binding fragment thereof that selectively binds to G protein-coupled receptor 4 (GPR4) or a variant thereof, comprising at least one of: a variable heavy chain region, wherein the variable heavy chain region comprises a complementarity-determining region heavy chain 1 (CDR-H1) of SEQ ID NO: 790, CDR-H2 of SEQ ID NO: 1332, and CDR-H3 of SEQ ID NO: 1874; and/or a variable light chain region, wherein the variable light chain region comprises a complementarity-determining region light chain 1 (CDR-L1) of SEQ ID NO: 1061, CDR-L2 of SEQ ID NO: 1603, and CDR-L3 of SEQ ID NO: 2145. In some embodiments, the variable heavy chain comprises a polypeptide consensus sequence having at least 95% sequence identity to the amino acid sequence of SEQ ID NO: 248, and the variable light chain comprises a polypeptide consensus sequence having at least 95% sequence identity to the amino acid sequence of SEQ ID NO: 519. In some embodiments, the antibody or antigen binding fragment thereof binds a human GPR4, mouse GPR4, rat GPR4, bovine GPR4, or cynomolgus monkey GPR4. In some embodiments, the human GPR4 comprises a sequence of SEQ ID NO: 4533.

[0473] Provided herein is an antibody that competes with an antibody or antigen binding fragment of any one of claims 1177-1180 for binding to GPR4, wherein the antibody binds to human GPR4 or mouse GPR4.

[0474] Provided herein is an antibody or an antigen binding fragment thereof that selectively binds to aarF domain containing kinase 5 (ADCK5) or a variant thereof, comprising at least one of: a variable heavy chain region, wherein the variable heavy chain region comprises a complementarity-determining region heavy chain 1 (CDR-H1) of SEQ ID NO: 791, CDR-H2 of SEQ ID NO: 1333, and CDR-H3 of SEQ ID NO: 1875; and/or a variable light chain region, wherein the variable light chain region comprises a complementarity-determining region light chain 1 (CDR-L1) of SEQ ID NO: 1062, CDR-L2 of SEQ ID NO: 1604, and CDR-L3 of SEQ ID NO: 2146. In some embodiments, the variable heavy chain comprises a polypeptide consensus sequence having at least 95% sequence identity to the amino acid sequence of SEQ ID NO: 249, and the variable light chain comprises a polypeptide consensus sequence having at least 95% sequence identity to the amino acid sequence of SEQ ID NO: 520. In some embodiments, the antibody or antigen binding fragment thereof binds a human ADCK5, mouse ADCK5, rat ADCK5, bovine ADCK5, or cynomolgus monkey ADCK5. In some embodiments, the human ADCK5 comprises a sequence of SEQ ID NO: 4423.

[0475] Provided herein is an antibody that competes with an antibody or antigen binding fragment of any one of claims 1182-1185 for binding to ADCK5, wherein the antibody binds to human ADCK5 or mouse ADCK5.

[0476] Provided herein is an antibody or an antigen binding fragment thereof that selectively binds to DIX domain containing 1, transcript variant 2 (DIXDC1) or a variant thereof, comprising at least one of: a variable heavy chain region, wherein the variable heavy chain region comprises a complementarity-determining region heavy chain 1 (CDR-H1) of SEQ ID NO: 792, CDR-H2 of SEQ ID NO: 1334, and CDR-H3 of SEQ ID NO: 1876; and/or a variable light chain region, wherein the variable light chain region comprises a complementarity-determining region light chain 1 (CDR-L1) of SEQ ID NO: 1063, CDR-L2 of SEQ ID NO: 1605, and CDR-L3 of SEQ ID NO: 2147. In some embodiments, the variable heavy chain comprises a polypeptide consensus sequence having at least 95% sequence identity to the amino acid sequence of SEQ ID NO: 250, and the variable light chain comprises a polypeptide consensus sequence having at least 95% sequence identity to the amino acid sequence of SEQ ID NO: 521. In some embodiments, the antibody or antigen binding fragment thereof binds a human DIXDC1, mouse DIXDC1, rat DIXDC1, bovine DIXDC1, or cynomolgus monkey DIXDC1. In some embodiments, the human DIXDC1 comprises a sequence of SEQ ID NO: 4524.

[0477] Provided herein is an antibody that competes with an antibody or antigen binding fragment of any one of claims 1187-1190 for binding to DIXDC1, wherein the antibody binds to human DIXDC1 or mouse DIXDC1.

[0478] Provided herein is an antibody or an antigen binding fragment thereof that selectively binds to Jupiter microtubule associated homolog 2 (HN1L) or a variant thereof, comprising at least one of: a variable heavy chain region, wherein the variable heavy chain region comprises a complementarity-determining region heavy chain 1 (CDR-H1) of SEQ ID NO: 793, CDR-H2 of SEQ ID NO: 1335, and CDR-H3 of SEQ ID NO: 1877; and/or a variable light chain region, wherein the variable light chain region comprises a complementarity-determining region light chain 1 (CDR-L1) of SEQ ID NO: 1064, CDR-L2 of SEQ ID NO: 1606, and CDR-L3 of SEQ ID NO: 2148. In some embodiments, the variable heavy chain comprises a polypeptide consensus sequence having at least 95% sequence identity to the amino acid sequence of SEQ ID NO: 251, and the variable light chain comprises a polypeptide consensus sequence having at least 95% sequence identity to the amino acid sequence of SEQ ID NO: 522. In some embodiments, the antibody or antigen binding fragment thereof binds a human HN1L, mouse HN1L, rat HN1L, bovine HN1L, or cynomolgus monkey HN1L. In some embodiments, the human HN1L comprises a sequence of SEQ ID NO: 4395.

[0479] Provided herein is an antibody that competes with an antibody or antigen binding fragment of any one of claims 1192-1195 for binding to HN1L, wherein the antibody binds to human HN1L or mouse HN1L.

[0480] Provided herein is an antibody or an antigen binding fragment thereof that selectively binds to G antigen 2A (GAGE2A) or a variant thereof, comprising at least one of: a variable heavy chain region, wherein the variable heavy chain region comprises a complementarity-determining region heavy chain 1 (CDR-H1) of SEQ ID NO: 794, CDR-H2 of SEQ ID NO: 1336, and CDR-H3 of SEQ ID NO: 1878; and/or a variable light chain region, wherein the variable light chain region comprises a complementarity-determining region light chain 1 (CDR-L1) of SEQ ID NO: 1065, CDR-L2 of SEQ ID NO: 1607, and CDR-L3 of SEQ ID NO: 2149. In some embodiments, the variable heavy chain comprises a polypeptide consensus sequence having at least 95% sequence identity to the amino acid sequence of SEQ ID NO: 252, and the variable light chain comprises a polypeptide consensus sequence having at least 95% sequence identity to the amino acid sequence of SEQ ID NO: 523. In some embodiments, the antibody or antigen binding fragment thereof binds a human GAGE2A, mouse GAGE2A, rat GAGE2A, bovine GAGE2A, or cynomolgus monkey GAGE2A. In some embodiments, the human GAGE2A comprises a sequence of SEQ ID NO: 4534.

[0481] Provided herein is an antibody that competes with an antibody or antigen binding fragment of any one of claims 1197-1200 for binding to GAGE2A, wherein the antibody binds to human GAGE2A or mouse GAGE2A.

[0482] Provided herein is an antibody or an antigen binding fragment thereof that selectively binds to DIX domain containing 1, transcript variant 2 (DIXDC1) or a variant thereof, comprising at least one of: a variable heavy chain region, wherein the variable heavy chain region comprises a complementarity-determining region heavy chain 1 (CDR-H1) of SEQ ID NO: 795, CDR-H2 of SEQ ID NO: 1337, and CDR-H3 of SEQ ID NO: 1879; and/or a variable light chain region, wherein the variable light chain region comprises a complementarity-determining region light chain 1 (CDR-L1) of SEQ ID NO: 1066, CDR-L2 of SEQ ID NO: 1608, and CDR-L3 of SEQ ID NO: 2150. In some embodiments, the variable heavy chain comprises a polypeptide consensus sequence having at least 95% sequence identity to the amino acid sequence of SEQ ID NO: 253, and the variable light chain comprises a polypeptide consensus sequence having at least 95% sequence identity to the amino acid sequence of SEQ ID NO: 524. In some embodiments, the antibody or antigen binding fragment thereof binds a human DIXDC1, mouse DIXDC1, rat DIXDC1, bovine DIXDC1, or cynomolgus monkey DIXDC1. In some embodiments, the human DIXDC1 comprises a sequence of SEQ ID NO: 4524.

[0483] Provided herein is an antibody that competes with an antibody or antigen binding fragment of any one of claims 1202-1205 for binding to DIXDC1, wherein the antibody binds to human DIXDC1 or mouse DIXDC1.

[0484] Provided herein is an antibody or an antigen binding fragment thereof that selectively binds to RNA polymerase II subunit E, transcript variant 1 (POLR2E) or a variant thereof, comprising at least one of: a variable heavy chain region, wherein the variable heavy chain region comprises a complementarity-determining region heavy chain 1 (CDR-H1) of SEQ ID NO: 795, CDR-H2 of SEQ ID NO: 1337, and CDR-H3 of SEQ ID NO: 1879; and/or a variable light chain region, wherein the variable light chain region comprises a complementarity-determining region light chain 1 (CDR-L1) of SEQ ID NO: 1066, CDR-L2 of SEQ ID NO: 1608, and CDR-L3 of SEQ ID NO: 2150. In some embodiments, the variable heavy chain comprises a polypeptide consensus sequence having at least 95% sequence identity to the amino acid sequence of SEQ ID NO: 253, and the variable light chain comprises a polypeptide consensus sequence having at least 95% sequence identity to the amino acid sequence of SEQ ID NO: 524. In some embodiments, the antibody or antigen binding fragment thereof binds a human POLR2E, mouse POLR2E, rat POLR2E, bovine POLR2E, or cynomolgus monkey POLR2E. In some embodiments, the human POLR2E comprises a sequence of SEQ ID NO: 4535.

[0485] Provided herein is an antibody that competes with an antibody or antigen binding fragment of any one of claims 1207-1210 for binding to POLR2E, wherein the antibody binds to human POLR2E or mouse POLR2E.

[0486] Provided herein is an antibody or an antigen binding fragment thereof that selectively binds to proliferating cell nuclear antigen, transcript variant 1 (PCNA) or a variant thereof, comprising at least one of: a variable heavy chain region, wherein the variable heavy chain region comprises a complementarity-determining region heavy chain 1 (CDR-H1) of SEQ ID NO: 796, CDR-H2 of SEQ ID NO: 1338, and CDR-H3 of SEQ ID NO: 1880; and/or a variable light chain region, wherein the variable light chain region comprises a complementarity-determining region light chain 1 (CDR-L1) of SEQ ID NO: 1067, CDR-L2 of SEQ ID NO: 1609, and CDR-L3 of SEQ ID NO: 2151. In some embodiments, the variable heavy chain comprises a polypeptide consensus sequence having at least 95% sequence identity to the amino acid sequence of SEQ ID NO: 254, and the variable light chain comprises a polypeptide consensus sequence having at least 95% sequence identity to the amino acid sequence of SEQ ID NO: 525. In some embodiments, the antibody or antigen binding fragment thereof binds a human PCNA, mouse PCNA, rat PCNA, bovine PCNA, or cynomolgus monkey PCNA. In some embodiments, the human PCNA comprises a sequence of SEQ ID NO: 4428.

[0487] Provided herein is an antibody that competes with an antibody or antigen binding fragment of any one of claims 1212-1215 for binding to PCNA, wherein the antibody binds to human PCNA or mouse PCNA.

[0488] Provided herein is an antibody or an antigen binding fragment thereof that selectively binds to BAF chromatin remodeling complex subunit BCL7C, transcript variant 2 (BCL7C) or a variant thereof, comprising at least one of: a variable heavy chain region, wherein the variable heavy chain region comprises a complementarity-determining region heavy chain 1 (CDR-H1) of SEQ ID NO: 797, CDR-H2 of SEQ ID NO: 1339, and CDR-H3 of SEQ ID NO: 1881; and/or a variable light chain region, wherein the variable light chain region comprises a complementarity-determining region light chain 1 (CDR-L1) of SEQ ID NO: 1068, CDR-L2 of SEQ ID NO: 1610, and CDR-L3 of SEQ ID NO: 2152. In some embodiments, the variable heavy chain comprises a polypeptide consensus sequence having at least 95% sequence identity to the amino acid sequence of SEQ ID NO: 255, and the variable light chain comprises a polypeptide consensus sequence having at least 95% sequence identity to the amino acid sequence of SEQ ID NO: 526. In some embodiments, the antibody or antigen binding fragment thereof binds a human BCL7C, mouse BCL7C, rat BCL7C, bovine BCL7C, or cynomolgus monkey BCL7C. In some embodiments, the human BCL7C comprises a sequence of SEQ ID NO: 4536.

[0489] Provided herein is an antibody that competes with an antibody or antigen binding fragment of any one of claims 1217-1220 for binding to BCL7C, wherein the antibody binds to human BCL7C or mouse BCL7C.

[0490] Provided herein is an antibody or an antigen binding fragment thereof that selectively binds to influenza virus NS1A binding protein (IVNS1ABP) or a variant thereof, comprising at least one of: a variable heavy chain region, wherein the variable heavy chain region comprises a complementarity-determining region heavy chain 1 (CDR-H1) of SEQ ID NO: 797, CDR-H2 of SEQ ID NO: 1339, and CDR-H3 of SEQ ID NO: 1881; and/or a variable light chain region, wherein the variable light chain region comprises a complementarity-determining region light chain 1 (CDR-L1) of SEQ ID NO: 1068, CDR-L2 of SEQ ID NO: 1610, and CDR-L3 of SEQ ID NO: 2152. In some embodiments, the variable heavy chain comprises a polypeptide consensus sequence having at least 95% sequence identity to the amino acid sequence of SEQ ID NO: 255, and the variable light chain comprises a polypeptide consensus sequence having at least 95% sequence identity to the amino acid sequence of SEQ ID NO: 526. In some embodiments, the antibody or antigen binding fragment thereof binds a human IVNS1ABP, mouse IVNS1ABP, rat IVNS1ABP, bovine IVNS1ABP, or cynomolgus monkey IVNS1ABP. In some embodiments, the human IVNS1ABP comprises a sequence of SEQ ID NO: 4391.

[0491] Provided herein is an antibody that competes with an antibody or antigen binding fragment of any one of claims 1222-1225 for binding to IVNS1ABP, wherein the antibody binds to human IVNS1ABP or mouse IVNS1ABP.

[0492] Provided herein is an antibody or an antigen binding fragment thereof that selectively binds to cancer/testis antigen 1A (CTAG1A) or a variant thereof, comprising at least one of: a variable heavy chain region, wherein the variable heavy chain region comprises a complementarity-determining region heavy chain 1 (CDR-H1) of SEQ ID NO: 798, CDR-H2 of SEQ ID NO: 1340, and CDR-H3 of SEQ ID NO: 1882; and/or a variable light chain region, wherein the variable light chain region comprises a complementarity-determining region light chain 1 (CDR-L1) of SEQ ID NO: 1069, CDR-L2 of SEQ ID NO: 1611, and CDR-L3 of SEQ ID NO: 2153. In some embodiments, the variable heavy chain comprises a polypeptide consensus sequence having at least 95% sequence identity to the amino acid sequence of SEQ ID NO: 256, and the variable light chain comprises a polypeptide consensus sequence having at least 95% sequence identity to the amino acid sequence of SEQ ID NO: 527. In some embodiments, the antibody or antigen binding fragment thereof binds a human CTAG1A, mouse CTAG1A, rat CTAG1A, bovine CTAG1A, or cynomolgus monkey CTAG1A. In some embodiments, the human CTAG1A comprises a sequence of SEQ ID NO: 4349.

[0493] Provided herein is an antibody that competes with an antibody or antigen binding fragment of any one of claims 1227-1230 for binding to CTAG1A, wherein the antibody binds to human CTAG1A or mouse CTAG1A.

[0494] Provided herein is an antibody or an antigen binding fragment thereof that selectively binds to cancer/testis antigen 1A (CTAG1A) or a variant thereof, comprising at least one of: a variable heavy chain region, wherein the variable heavy chain region comprises a complementarity-determining region heavy chain 1 (CDR-H1) of SEQ ID NO: 802, CDR-H2 of SEQ ID NO: 1344, and CDR-H3 of SEQ ID NO: 1886; and/or a variable light chain region, wherein the variable light chain region comprises a complementarity-determining region light chain 1 (CDR-L1) of SEQ ID NO: 1073, CDR-L2 of SEQ ID NO: 1615, and CDR-L3 of SEQ ID NO: 2157. In some embodiments, the variable heavy chain comprises a polypeptide consensus sequence having at least 95% sequence identity to the amino acid sequence of SEQ ID NO: 260, and the variable light chain comprises a polypeptide consensus sequence having at least 95% sequence identity to the amino acid sequence of SEQ ID NO: 531. In some embodiments, the antibody or antigen binding fragment thereof binds a human CTAG1A, mouse CTAG1A, rat CTAG1A, bovine CTAG1A, or cynomolgus monkey CTAG1A. In some embodiments, the human CTAG1A comprises a sequence of SEQ ID NO: 4349.

[0495] Provided herein is an antibody that competes with an antibody or antigen binding fragment of any one of claims 1232-1235 for binding to CTAG1A, wherein the antibody binds to human CTAG1A or mouse CTAG1A.

[0496] Provided herein is an antibody or an antigen binding fragment thereof that selectively binds to UTP6 small subunit processome component (UTP6) or a variant thereof, comprising at least one of: a variable heavy chain region, wherein the variable heavy chain region comprises a complementarity-determining region heavy chain 1 (CDR-H1) of SEQ ID NO: 803, CDR-H2 of SEQ ID NO: 1345, and CDR-H3 of SEQ ID NO: 1887; and/or a variable light chain region, wherein the variable light chain region comprises a complementarity-determining region light chain 1 (CDR-L1) of SEQ ID NO: 1074, CDR-L2 of SEQ ID NO: 1616, and CDR-L3 of SEQ ID NO: 2158. In some embodiments, the variable heavy chain comprises a polypeptide consensus sequence having at least 95% sequence identity to the amino acid sequence of SEQ ID NO: 261, and the variable light chain comprises a polypeptide consensus sequence having at least 95% sequence identity to the amino acid sequence of SEQ ID NO: 532. In some embodiments, the antibody or antigen binding fragment thereof binds a human UTP6, mouse UTP6, rat UTP6, bovine UTP6, or cynomolgus monkey UTP6. In some embodiments, the human UTP6 comprises a sequence of SEQ ID NO: 4537.

[0497] Provided herein is an antibody that competes with an antibody or antigen binding fragment of any one of claims 1237-1240 for binding to UTP6, wherein the antibody binds to human UTP6 or mouse UTP6.

[0498] Provided herein is an antibody or an antigen binding fragment thereof that selectively binds to cancer/testis antigen 1A (CTAG1A) or a variant thereof, comprising at least one of: a variable heavy chain region, wherein the variable heavy chain region comprises a complementarity-determining region heavy chain 1 (CDR-H1) of SEQ ID NO: 811, CDR-H2 of SEQ ID NO: 1353, and CDR-H3 of SEQ ID NO: 1895; and/or a variable light chain region, wherein the variable light chain region comprises a complementarity-determining region light chain 1 (CDR-L1) of SEQ ID NO: 1082, CDR-L2 of SEQ ID NO: 1624, and CDR-L3 of SEQ ID NO: 2166. In some embodiments, the variable heavy chain comprises a polypeptide consensus sequence having at least 95% sequence identity to the amino acid sequence of SEQ ID NO: 269, and the variable light chain comprises a polypeptide consensus sequence having at least 95% sequence identity to the amino acid sequence of SEQ ID NO: 540. In some embodiments, the antibody or antigen binding fragment thereof binds a human CTAG1A, mouse CTAG1A, rat CTAG1A, bovine CTAG1A, or cynomolgus monkey CTAG1A. In some embodiments, the human CTAG1A comprises a sequence of SEQ ID NO: 4349.

[0499] Provided herein is an antibody that competes with an antibody or antigen binding fragment of any one of claims 1242-1245 for binding to CTAG1A, wherein the antibody binds to human CTAG1A or mouse CTAG1A.

[0500] Provided herein is an antibody or an antigen binding fragment thereof that selectively binds to RP2 activator of ARL3 GTPase (RP2) or a variant thereof, comprising at least one of: a variable heavy chain region, wherein the variable heavy chain region comprises a complementarity-determining region heavy chain 1 (CDR-H1) of SEQ ID NO: 812, CDR-H2 of SEQ ID NO: 1354, and CDR-H3 of SEQ ID NO: 1896; and/or a variable light chain region, wherein the variable light chain region comprises a complementarity-determining region light chain 1 (CDR-L1) of SEQ ID NO: 1083, CDR-L2 of SEQ ID NO: 1625, and CDR-L3 of SEQ ID NO: 2167. In some embodiments, the variable heavy chain comprises a polypeptide consensus sequence having at least 95% sequence identity to the amino acid sequence of SEQ ID NO: 270, and the variable light chain comprises a polypeptide consensus sequence having at least 95% sequence identity to the amino acid sequence of SEQ ID NO: 541. In some embodiments, the antibody or antigen binding fragment thereof binds a human RP2, mouse RP2, rat RP2, bovine RP2, or cynomolgus monkey RP2. In some embodiments, the human RP2 comprises a sequence of SEQ ID NO: 4538.

[0501] Provided herein is an antibody that competes with an antibody or antigen binding fragment of any one of claims 1247-1250 for binding to RP2, wherein the antibody binds to human RP2 or mouse RP2.

### INCORPORATION BY REFERENCE

[0502] All publications, patents, and patent applications mentioned in this specification are herein incorporated by reference to the same extent as if each individual publication, patent, or patent application was specifically and individually indicated to be incorporated by reference.

### BRIEF DISCLOSURE OF THE DRAWINGS

[0503] The novel features of the invention are set forth with particularity in the appended claims. A better understanding of the features and advantages of the present invention will be obtained by reference to the following detailed description that sets forth illustrative embodiments, in which the principles of the invention are utilized, and the accompanying drawings of which:

[0504] FIG. 1 shows an exemplary scheme of computational pipeline used for identifying immunoglobulin clonotypes.

[0505] FIG. 2 demonstrates Multivariate Cox proportional hazards regression analysis for the TCGA-SKCM cohort, with covariates including patient gender, age at diagnosis, tumor stage (TMN system) and the expression of MZB1 and FOXM1 genes. Squares represent the hazard ratio (HR) and the horizontal bars extend from the lower limit to the upper limit of the 95% confidence interval of the estimate of the hazard ratio. The plot also shows the number of considered events (N) and Wald test p-values (p) for the interaction between survival and any covariate.

[0506] FIGS. 3A-3J show alignment visualization of 5 individual patients and immunoglobulin sequences. Individual reads obtained from RNA-seq are shown for the 5 selected patients. The aligned germline VDJ segments are shown at the bottom of each track. IGV colors paired-end alignments that deviate from expectations (horizontal colored lines) and the mismatched bases are displayed as vertical lines in darker shades of gray.

[0507] FIG. 4 depicts an exemplary schema of VDJ identification pipeline.

[0508] FIG. 5 shows a detailed schema of somatic VDJ sequence identification.

[0509] FIG. 6A shows heavy chain and FIG. 6B shows light chain refined alignment for selected patient compared to the initial alignment. Sudden coverage drop can be observed at D segment of heavy chain and the V-J junction of the light chain.

[0510] FIG. 7 shows assembly visualization of a heavy D segment.

[0511] FIG. 8 shows an IGV plot of heavy chain with a corrected D segment after the alignment stage.

[0512] FIG. 9 illustrates a detailed schema of germline and CDR sequence identification.

[0513] FIGS. 10A-10L show exemplary antibodies identified using the methods described herein, displaying strong evidence of somatic hypermutation.

[0514] FIG. 11 is a schematic illustration demonstrating the use of T-cell receptor fusion polypeptides.

[0515] FIG. 12A represents schematic illustrations demonstrating exemplary variations of reprogrammed T-cell receptor fusion polypeptides (TFPs) of the invention. An exemplary reprogrammed TCR containing a TFP that contains an anti-CAg scFv and a full-length TCR Vα polypeptide fused via a (G4S)3 linker sequence is illustrated.

[0516] FIG. 12B illustrates a series of exemplary reprogrammed TCRs that contain multiple TFPs including i) an anti-CAg scFv and a full-length TCR Vα polypeptide fused via a (G4S)3 linker sequence and ii) an anti-CAg scFv and a full-length TCR Vβ polypeptide fused via a (G4S)3 linker sequence.

[0517] FIG. 12C illustrates an exemplary reprogrammed TCR that contains multiple TFPs including i) an anti-CAg scFv and a truncated (Δ) TCR polypeptide fused via a (G4S)3 linker sequence and ii) an anti-CAg scFv and a full-length CD3 epsilon polypeptide fused via a (G4S)3 linker sequence. The truncated (Δ) TCR polypeptide is truncated by the deletion of the Vα.

[0518] FIG. 12D illustrates an exemplary reprogrammed TCR that contains multiple TFPs including i) an anti-CAg scFv and a truncated (Δ) TCR Vα polypeptide fused via a (G4S)3 linker sequence and ii) an anti-CAg scFv and a truncated (Δ) TCR Vβ polypeptide fused via a (G4S)3 linker sequence. The truncated (Δ) TCR polypeptide is truncated by the deletion of the Vβ.

[0519] FIG. 13 is a schematic illustration demonstrating the use of T-cell receptor fusion polypeptides (TFPs) of the invention. An exemplary TFP contains an anti-CAg VH domain and a full-length CD3 epsilon polypeptide fused via a (G4S)3 linker sequence. When produced by a T-cell or introduced into a T-cell, the TFP associates with other polypeptides of the endogenous T-cell receptor (TCR) (shown to include two CD3 epsilon polypeptides, one CD3 gamma polypeptide, one CD3 delta polypeptide, two CD3 zeta polypeptides, one TCR alpha subunit and one TCR beta subunit, where the horizontal grey segment represents the plasma membrane) to form a reprogrammed TCR in which one or both of the endogenous CD3 epsilon polypeptides are substituted by the TFP.

[0520] FIG. 14 is a series of schematic illustrations demonstrating DNA constructs encoding various TFPs.

[0521] FIG. 15 is protein array data showing specific binding of antigen R-spondin 1, transcript variant 2 by TBLA1001 antibody.

[0522] FIG. 16 is protein array data showing specific binding of zinc finger DHHC-type containing 1, transcript variant 1 by TBLA1003 antibody.

[0523] FIG. 17 is protein array data showing specific binding of retinoid X receptor alpha, transcript variant 1, by TBLA1004 antibody.

[0524] FIG. 18 is protein array data showing specific binding of retinoid X receptor alpha, transcript variant 1, by TBLA1005 antibody.

[0525] FIG. 19 is protein array data showing specific binding of SNAP associated protein, transcript variant 1, by TBLA1006 antibody.

[0526] FIG. 20 is protein array data showing specific binding of glycogen phosphorylase L, transcript variant 1, Reticulocalbin 3, and synaptotagmin 12, transcript variant X4 by TBLA1007 antibody.

[0527] FIG. 21 is protein array data showing specific binding of Nuclear receptor subfamily 2 group f member 6 and protein phosphatase 1 regulatory subunit 13 like, transcript variant 2 by TBLA1008 antibody.

[0528] FIG. 22 is protein array data showing specific binding of olfactory receptor family 6 subfamily Q member 1 (gene/pseudogene) by TBLA1010 antibody.

[0529] FIG. 23 is protein array data showing specific binding of cancer/testis antigen 1A by TBLA1011 antibody.

[0530] FIG. 24 is protein array data showing specific binding of cancer/testis antigen 1A by TBLA1012 antibody.

[0531] FIG. 25 is protein array data showing specific binding of 5-hydroxytryptamine receptor 1E by TBLA1013 antibody.

[0532] FIG. 26 is protein array data showing specific binding of microfibril associated protein 3, transcript variant 3 by TBRE1002 antibody.

[0533] FIG. 27 is protein array data showing specific binding of hyaluronan binding protein 4 by TBRE1004 antibody.

[0534] FIG. 28 is protein array data showing specific binding of glucuronidase, beta pseudogene by TBRE1006 antibody.

[0535] FIG. 29 is protein array data showing specific binding of dual specificity phosphatase 12 and actinin alpha 1, transcript variant 2 by TBRE1007 antibody.

[0536] FIG. 30 is protein array data showing specific binding of zinc finger with KRAB and SCAN domains 4, transcript variant X1 by TBRE1009 antibody.

[0537] FIG. 31 is protein array data showing specific binding of PNMA family member 5, transcript variant 2 by TBRE1011 antibody.

[0538] FIG. 32 is protein array data showing specific binding of kelch like family member 40, and membrane palmitoylated protein 2, transcript variant 3 by TBRE1012 antibody.

[0539] FIG. 33 is protein array data showing specific binding of butyrophilin subfamily 1 member A1 by TBRE1013 antibody.

[0540] FIG. 34 is protein array data showing specific binding of peroxisomal biogenesis factor 11 gamma, transcript variant 1 by TBRE1014 antibody.

[0541] FIG. 35 is protein array data showing specific binding of zinc finger protein 8, SATB homeobox 2 transcript variant 2, and ganglioside induced differentiation associated protein 1 transcript variant 2 by TBRE1017 antibody.

[0542] FIG. 36 is protein array data showing specific binding of catenin alpha like 1, transcript variant 1 by TBRE1023 antibody.

[0543] FIG. 37 is protein array data showing specific binding of FA complementation group G by TBRE1024 antibody.

[0544] FIG. 38 is protein array data showing specific binding of DEAD-box helicase 18, syntaxin 1A, transcript variant 1, and geminin DNA replication inhibitor, transcript variant 1, by TBRE1027 antibody.

[0545] FIG. 39 is protein array data showing specific binding of ubiquilin 1, transcript variant 2 and carnosine dipeptidase 2, transcript variant 1 by TBRE1030 antibody.

[0546] FIG. 40 is protein array data showing specific binding of X-linked inhibitor of apoptosis, transcript variant 2, and hyaluronan binding protein 4 by TBRE1032 antibody.

[0547] FIG. 41 is protein array data showing specific binding of endosome associated trafficking regulator 1, transcript variant 2 charged multivesicular body protein 4B by TBRE1034 antibody.

[0548] FIG. 42 is protein array data showing specific binding of glycogenin 2, transcript variant 2 by TBRE1035 antibody.

[0549] FIG. 43 is protein array data showing specific binding of Egf like and emi domain containing 1, pseudogene by TBRE1036 antibody.

[0550] FIG. 44 is protein array data showing specific binding of actinin alpha 4, transcript variant 1 by TBRE1038 antibody.

[0551] FIG. 45 is protein array data showing specific binding of PNMA family member 5, transcript variant 2 phospholipase C delta 1, transcript variant 2, and zinc finger protein 326, transcript variant 1 by TBRE1039 antibody.

[0552] FIG. 46 is protein array data showing specific binding of LN608403.1_frag, JPX transcript XIST activator, and odorant binding protein 2A, transcript variant alpha by TBRE1045 antibody.

[0553] FIG. 47 is protein array data showing specific binding of myelin transcription factor 1 like, transcript variant 2 heat shock protein family E (Hsp10) member 1 by TBRE1049 antibody.

[0554] FIG. 48 is protein array data showing specific binding of kelch like ECH associated protein 1, transcript variant 1 by TBRE1052 antibody.

[0555] FIG. 49 is protein array data showing specific binding of nucleosome assembly protein 1 like 1, transcript variant 1 by TCER1001 antibody.

[0556] FIG. 50 is protein array data showing specific binding of nudE neurodevelopment protein 1, transcript variant 1 by TCER1002 antibody.

[0557] FIG. 51 is protein array data showing specific binding of TruB pseudouridine synthase family member 1 inosine monophosphate dehydrogenase 2, and phospholipid scramblase 4, transcript variant X4 by TCER1003 antibody.

[0558] FIG. 52 is protein array data showing specific binding of influenza virus NS1A binding protein by TCER1004 antibody.

[0559] FIG. 53 is protein array data showing specific binding of disheveled segment polarity protein 3, and Zinc finger protein 260 by TCER1005 antibody.

[0560] FIG. 54 is protein array data showing specific binding of sorting nexin 33, transcript variant 1 by TCER1006 antibody.

[0561] FIG. 55 is protein array data showing specific binding of Jupiter microtubule associated homolog 2, and thioesterase superfamily member 6, transcript variant 1 by TCER1007 antibody.

[0562] FIG. 56 is protein array data showing specific binding of KH RNA binding domain containing, signal transduction associated 2, transcript variant 2 by TCHO1001 antibody.

[0563] FIG. 57 is protein array data showing specific binding of complement C1q like 3 by TCOL1001 antibody.

[0564] FIG. 58 is protein array data showing specific binding of protein phosphatase 1 regulatory subunit 27 by TCOL1002 antibody.

[0565] FIG. 59 is protein array data showing specific binding of deoxyribonuclease 1 like 2, transcript variant 1 by TCOL1003 antibody.

[0566] FIG. 60 is protein array data showing specific binding of extended synaptotagmin 2 by TCOL1004 antibody.

[0567] FIG. 61 is protein array data showing specific binding of C—C motif chemokine ligand 18 by TCOL1005 antibody.

[0568] FIG. 62 is protein array data showing specific binding of homeobox and leucine zipper encoding and BAR/IMD domain containing adaptor protein 2, transcript variant 3 by TCOL1006 antibody.

[0569] FIG. 63 is protein array data showing specific binding of kelch like ECH associated protein 1, transcript variant 1 by TCOL1007 antibody.

[0570] FIG. 64 is protein array data showing specific binding of RUN and FYVE domain containing 3, transcript variant 2 by TCOL1008 antibody.

[0571] FIG. 65A is protein array data showing specific binding of LIM homeobox 5, transcript variant 2 by TCOL1009 antibody. FIG. 65B is protein array data showing specific binding of growth factor receptor bound protein 2, transcript variant 1 by TCOL1009 antibody.

[0572] FIG. 66 is protein array data showing specific binding of Tyrosine hydroxylase by TESO1001 antibody.

[0573] FIG. 67 is protein array data showing specific binding of leucine rich repeat containing 28, transcript variant 1 by TESO1003 antibody.

[0574] FIG. 68A is protein array data showing specific binding of spermatogenesis associated 33, transcript variant 2 by TESO1005 antibody. FIG. 68B is an experimental replicate.

[0575] FIG. 69 is protein array data showing specific binding of Atpase secretory pathway ca2+ transporting 1, and teashirt zinc finger homeobox 2, transcript variant 1 by TESO1006 antibody.

[0576] FIG. 70 is protein array data showing specific binding of Complement component 4 binding protein beta by THNS1002 antibody.

[0577] FIG. 71 is protein array data showing specific binding of NCCRP1, F-box associated domain containing, and coiled-coil domain containing 102A, transcript variant X1 by THNS1003 antibody.

[0578] FIG. 72 is protein array data showing specific binding of RNA binding motif protein 47, transcript variant X10 by THNS1004 antibody.

[0579] FIG. 73 is protein array data showing specific binding of RAD1 checkpoint DNA exonuclease, transcript variant 1, and Microtubule associated scaffold protein 1 by THNS1006 antibody.

[0580] FIG. 74 is protein array data showing specific binding of kelch like ECH associated protein 1, transcript variant 1 by THNS1008 antibody.

[0581] FIG. 75 is protein array data showing specific binding of PNMA family member 5, transcript variant 2 by THNS1009 antibody.

[0582] FIG. 76 is protein array data showing specific binding of G protein-coupled receptor 83, transcript variant 1 by THNS1013 antibody.

[0583] FIG. 77 is protein array data showing specific binding of CDP-diacylglycerol synthase 1, and dynein axonemal assembly factor 3, transcript variant 3 by THNS1014 antibody.

[0584] FIG. 78 is protein array data showing specific binding of copine 1, transcript variant 2 by TKIC1001 antibody.

[0585] FIG. 79 is protein array data showing specific binding of aarF domain containing kinase 5 by TKIC1002 antibody.

[0586] FIG. 80 is protein array data showing specific binding of crystallin alpha B, transcript variant 2 by TKIC1004 antibody.

[0587] FIG. 81 is protein array data showing specific binding of hematopoietic cell-specific Lyn substrate 1, transcript variant 1 by TKIC1005 antibody.

[0588] FIG. 82 is protein array data showing specific binding of aldo-keto reductase family 1 member B, transcript variant 1 by TKIC1006 antibody.

[0589] FIG. 83 is protein array data showing specific binding of surfeit 6, transcript variant 1 by TKIC1007 antibody.

[0590] FIG. 84A is protein array data showing specific binding of S100 calcium binding protein B by TKIC10012 antibody. FIG. 84B is an experimental replicate showing specific binding of S100 calcium binding protein B by TKIC10012 antibody.

[0591] FIG. 85 is protein array data showing specific binding of checkpoint kinase 2, transcript variant 3 by TKIC10013 antibody.

[0592] FIG. 86A is protein array data showing specific binding of ankyrin repeat domain 53, transcript variant 2 by TKIC10019 antibody. FIG. 86B is an experimental replicate showing specific binding of ankyrin repeat domain 53, transcript variant 2 by TKIC10019 antibody.

[0593] FIG. 87 is protein array data showing specific binding of Killer cell lectin like receptor g2, tripartite motif containing 35, transcript variant 1, and FMR1 autosomal homolog 2 by TLUA1001 antibody.

[0594] FIG. 88A is protein array data showing specific binding of annexin A1 by TLUA1004 antibody. FIG. 88B is an experimental replicate showing specific binding of annexin A1 by TLUA1004 antibody.

[0595] FIG. 89 is protein array data showing specific binding of zinc finger protein 287, transcript variant 2 by TLUA1008 antibody.

[0596] FIG. 90 is protein array data showing specific binding of family with sequence similarity 177 member A1, transcript variant 2 by TLUA1016 antibody.

[0597] FIG. 91 is protein array data showing specific binding of quinoid dihydropteridine reductase, transcript variant 1 by TLUS1001 antibody.

[0598] FIG. 92 is protein array data showing specific binding of ELK2, member of ETS oncogene family, pseudogene 1, and methyltransferase like 21C by TLUS1003 antibody.

[0599] FIG. 93 is protein array data showing specific binding of hydroxymethylbilane synthase, transcript variant X3, and hook microtubule tethering protein 2, transcript variant 2 by TLUS1006 antibody.

[0600] FIG. 94 is protein array data showing specific binding of Mage12, and serine and arginine rich splicing factor 3, transcript variant 1 by TMEL1016 antibody.

[0601] FIG. 95 is protein array data showing specific binding of RAN binding protein 10, transcript variant 1, and Wnt family member 9 by TMEL1017 antibody.

[0602] FIG. 96 is protein array data showing specific binding of ubiquilin 2, ubiquilin 1, transcript variant 2, and Ubiquilin 3 by TMEL1018 antibody.

[0603] FIG. 97 is protein array data showing specific binding of anterior gradient 3, protein disulphide isomerase family member by TMEL1020 antibody.

[0604] FIG. 98 is protein array data showing specific binding of serine and arginine rich splicing factor 3, transcript variant 1 by TMEL1022 antibody.

[0605] FIG. 99A is protein array data showing specific binding of baculoviral IAP repeat containing 7, transcript variant 1 by TMEL1023 antibody. FIG. 99B is an experimental replicate showing specific binding of baculoviral IAP repeat containing 7, transcript variant 1 by TMEL1023 antibody.

[0606] FIG. 100 is protein array data showing specific binding of endosome associated trafficking regulator 1, transcript variant 2 by TMEL1025 antibody.

[0607] FIG. 101 is protein array data showing specific binding of microtubule associated scaffold protein 2, transcript variant 2 by TMEL1027 antibody.

[0608] FIG. 102 is protein array data showing specific binding of zinc finger protein 296 phosphodiesterase 5A, transcript variant 1, and Ep400 pseudogene 1 by TMEL1028 antibody.

[0609] FIG. 103 is protein array data showing specific binding of Bcl2 like 1 by TMEL1030 antibody.

[0610] FIG. 104 is protein array data showing specific binding of arginine and glutamate rich 1, and SAS-6 centriolar assembly protein, transcript variant 2 by TMEL1031 antibody.

[0611] FIG. 105 is protein array data showing specific binding of proteasome 26S subunit, non-ATPase 4, transcript variant 2, and Src like adaptor, transcript variant 1 by TMEL1032 antibody.

[0612] FIG. 106 is protein array data showing specific binding of nudix hydrolase 21 zinc finger protein 431, transcript variant 2, and Zinc finger protein 699 by TMEL1033 antibody.

[0613] FIG. 107 is protein array data showing specific binding of quinoid dihydropteridine reductase, transcript variant 1 by TMEL1034 antibody.

[0614] FIG. 108 is protein array data showing specific binding of PAGE family member 2 keratin associated protein 12-3 by TMEL1035 antibody.

[0615] FIG. 109 is protein array data showing specific binding of enolase 2 chromosome 11 open reading frame 68, transcript variant 1 by TMEL1037 antibody.

[0616] FIG. 110 is protein array data showing specific binding of enolase 2 chromosome 11 open reading frame 68, transcript variant 1 by TMEL1037 antibody.

[0617] FIG. 111 is protein array data showing specific binding of serpin family B member 6, transcript variant 2 by TMEL1040 antibody.

[0618] FIG. 112 is protein array data showing specific binding of Dpy-30 histone methyltransferase complex regulatory subunit, and rhophilin associated tail protein 1 like, transcript variant 2 by TMEL1041 antibody.

[0619] FIG. 113 is protein array data showing specific binding of endosome associated trafficking regulator 1, transcript variant 2 by TMES1001 antibody.

[0620] FIG. 114 is protein array data showing specific binding of Jupiter microtubule associated homolog 2, and BTB domain containing 8 by TMES1002 antibody.

[0621] FIG. 115 is protein array data showing specific binding of neutrophil cytosolic factor 4, transcript variant 2, t-complex 11 like 2, transcript variant X2, and phospholipase C beta 2, transcript variant 4 by TMES1003 antibody.

[0622] FIG. 116 is protein array data showing specific binding of microtubule associated protein RP/EB family member 2, transcript variant 1 by TMES1004 antibody.

[0623] FIG. 117 is protein array data showing specific binding of DEAD-box helicase 53 by TOVA1001 antibody.

[0624] FIG. 118 is protein array data showing specific binding of interleukin 27 receptor subunit alpha by TOVA1002 antibody.

[0625] FIG. 119 is protein array data showing specific binding of Deoxyhypusine synthase by TOVA1003 antibody.

[0626] FIG. 120A is protein array data showing specific binding of HEAT repeat containing 3, transcript variant 1 by TOVA1004 antibody. FIG. 120B is an experimental replicate showing specific binding of HEAT repeat containing 3, transcript variant 1 by TOVA1004 antibody.

[0627] FIG. 121 is protein array data showing specific binding of DEAD-box helicase 53, Vezatin, adherens junctions transmembrane protein, and Wd repeat domain 3 by TOVA1005 antibody.

[0628] FIG. 122A is protein array data showing specific binding of DExD/H-box helicase 58 by TOVA1006 antibody. FIG. 122B is an experimental replicate showing specific binding of DExD/H-box helicase 58 by TOVA1006 antibody.

[0629] FIG. 123 is protein array data showing specific binding of nudix hydrolase 22, transcript variant 2 by TOVA1007 antibody.

[0630] FIG. 124 is protein array data showing specific binding of Jupiter microtubule associated homolog 2 by TOVA1008 antibody.

[0631] FIG. 125 is protein array data showing specific binding of grancalcin, transcript variant 4 by TPAN1001 antibody.

[0632] FIG. 126 is protein array data showing specific binding of endoplasmic reticulum protein 27, transcript variant 1 by TPAN1002 antibody.

[0633] FIG. 127 is protein array data showing specific binding of Rna polymerase iii subunit g by TPAN1003 antibody.

[0634] FIG. 128 is protein array data showing specific binding of sorting nexin 1, transcript variant 1 by TPAN1004 antibody.

[0635] FIG. 129 is protein array data showing specific binding of SAA2-SAA3, and proteasome 26S subunit, non-ATPase 3 by TPAN1005 antibody.

[0636] FIG. 130A is protein array data showing specific binding of CRK like proto-oncogene, adaptor protein, transcript variant 1 by TPAN1006 antibody. FIG. 130B is an experimental replicate showing specific binding of CRK like proto-oncogene, adaptor protein, transcript variant 1 by TPAN1006 antibody.

[0637] FIG. 131 is protein array data showing specific binding of F-box protein 2, and tubulin gamma 1 by TPAN1007 antibody.

[0638] FIG. 132 is protein array data showing specific binding of oxidation resistance 1, transcript variant 1 by TPRO1001 antibody.

[0639] FIG. 133 is protein array data showing specific binding of Ankyrin repeat domain 20 family member a5, pseudogene, Kirre like nephrin family adhesion molecule 1, and GRB10 interacting GYF protein 1, transcript variant X10 by TPRO1002 antibody.

[0640] FIG. 134 is protein array data showing specific binding of defensin alpha 3 by TPRO1003 antibody.

[0641] FIG. 135 is protein array data showing specific binding of radial spoke head 14 homolog by TREC1001 antibody.

[0642] FIG. 136 is protein array data showing specific binding of C—C motif chemokine ligand 2 by TREC1002 antibody.

[0643] FIG. 137 is protein array data showing specific binding of killer cell lectin like receptor Cl, transcript variant 3, and kelch like family member 12, transcript variant 2 by TREC1003 antibody.

[0644] FIG. 138 is protein array data showing specific binding of neural retina leucine zipper, transcript variant X4 by TSAR1001 antibody.

[0645] FIG. 139 is protein array data showing specific binding of phospholipase C delta 4 by TSAR1002 antibody.

[0646] FIG. 140 is protein array data showing specific binding of coiled-coil domain containing 74B, transcript variant 2 by TSAR1003 antibody.

[0647] FIG. 141 is protein array data showing specific binding of DEAD-box helicase 53 by TSAR1004 antibody.

[0648] FIG. 142 is protein array data showing specific binding of HSPA (Hsp70) binding protein 1, transcript variant 2, heat shock protein family A (Hsp70) member 2, and BCL2 associated athanogene 2 by TSAR1005 antibody.

[0649] FIG. 143A is protein array data showing specific binding of C—X—C motif chemokine receptor 4, transcript variant 2 by TSAR1006 antibody. FIG. 143B is protein array data showing specific binding of Long intergenic non-protein coding rna 242 by TSAR1006 antibody.

[0650] FIG. 144 is protein array data showing specific binding of signal transducer and activator of transcription 5A, transcript variant 2, and quinoid dihydropteridine reductase, transcript variant 1 by TSAR1007 antibody.

[0651] FIG. 145 is protein array data showing specific binding of calcium and integrin binding 1, transcript variant b, and t-SNARE domain containing 1, transcript variant 1 by TSTO1001 antibody.

[0652] FIG. 146 is protein array data showing specific binding of HAUS augmin like complex subunit 1, transcript variant 1, and DPY30 domain containing 1, transcript variant X4 by TSTO1002 antibody.

[0653] FIG. 147 is protein array data showing specific binding of Transforming growth factor beta 3 by TSTO1003 antibody.

[0654] FIG. 148 is protein array data showing specific binding of chymotrypsinogen B2 by TSTO1004 antibody.

[0655] FIG. 149 is protein array data showing specific binding of NFKB inhibitor beta, transcript variant 1, and cyclin dependent kinase 2 associated protein 2, transcript variant 1 by TSTO1005 antibody.

[0656] FIG. 150 is protein array data showing specific binding of lipase family member N, transcript variant X1 by TSTO1006 antibody.

[0657] FIG. 151 is protein array data showing specific binding of regulator of G protein signaling 14, transcript variant 1, and leucine rich repeat containing 14, transcript variant 1 by TSTO1007 antibody.

[0658] FIG. 152 is protein array data showing specific binding of transforming growth factor beta induced by TSTO1008 antibody.

[0659] FIG. 153 is protein array data showing specific binding of BCL2 apoptosis regulator, transcript variant alpha by TSTO1010 antibody.

[0660] FIG. 154 is protein array data showing specific binding of DIX domain containing 1, transcript variant 2 by TTES1001 antibody.

[0661] FIG. 155 is protein array data showing specific binding of Caspase 8, and phosphoglucomutase 2 like 1 by TTES1002 antibody.

[0662] FIG. 156A is protein array data showing specific binding of programmed cell death 1 by TTES1003 antibody. FIG. 156B is an experimental replicate showing specific binding programmed cell death 1 by TTES1003 antibody. FIG. 156B is an experimental replicate.

[0663] FIG. 157 is protein array data showing specific binding of glyoxylate and hydroxypyruvate reductase by TTES1004 antibody.

[0664] FIG. 158 is protein array data showing specific binding of Cytochrome b5 reductase 2 by TTES1005 antibody.

[0665] FIG. 159 is protein array data showing specific binding of acyl-CoA binding domain containing 6 by TTES1006 antibody.

[0666] FIG. 160 is protein array data showing specific binding of phosducin like by TTES1007 antibody.

[0667] FIG. 161 is protein array data showing specific binding of Dexd-box helicase 52, and G protein-coupled receptor 4 by TTES1008 antibody.

[0668] FIG. 162 is protein array data showing specific binding of aarF domain containing kinase 5 by TTES1009 antibody.

[0669] FIG. 163 is protein array data showing specific binding of DIX domain containing 1, transcript variant 2 by TTES1010 antibody.

[0670] FIG. 164 is protein array data showing specific binding of Jupiter microtubule associated homolog 2 by TTES1011 antibody.

[0671] FIG. 165 is protein array data showing specific binding of G antigen 2A by TTES1012 antibody.

[0672] FIG. 166 is protein array data showing specific binding of DIX domain containing 1, transcript variant 2, and RNA polymerase II subunit E, transcript variant 1 by TTHY1001 antibody.

[0673] FIG. 167 is protein array data showing specific binding of proliferating cell nuclear antigen, transcript variant 1 by TTHY1002 antibody.

[0674] FIG. 168 is protein array data showing specific binding of BAF chromatin remodeling complex subunit BCL7C, transcript variant 2, and influenza virus NS1A binding protein by TTHY1003 antibody.

[0675] FIG. 169 is protein array data showing specific binding of cancer/testis antigen 1A by TTHY1004 antibody.

[0676] FIG. 170 is protein array data showing specific binding of cancer/testis antigen 1A by TUCE1004 antibody.

[0677] FIG. 171 is protein array data showing specific binding of UTP6 small subunit processome component by TUCE1005 antibody.

[0678] FIG. 172 is protein array data showing specific binding of cancer/testis antigen 1A by TUCS1003 antibody.

[0679] FIG. 173 is protein array data showing specific binding of RP2 activator of ARL3 GTPase by TUVM1001 antibody.

### DETAILED DESCRIPTION OF THE INVENTION

[0680] It is to be understood that this application is not limited to particular formulations or process parameters, as these may, of course, vary. It is also to be understood that the terminology used herein is for the purpose of describing particular embodiments only, and is not intended to be limiting. Further, it is understood that a number of methods and materials similar or equivalent to those described herein can be used in the practice of the present inventions.

[0681] In accordance with the present application, there may be employed conventional molecular biology, microbiology, and recombinant DNA techniques as explained fully in the art.

[0682] The following definitions supplement those in the art and are directed to the current application and are not to be imputed to any related or unrelated case, e.g., to any commonly owned patent or application. Accordingly, the terminology used herein is for the purpose of describing particular embodiments only, and is not intended to be limiting.

[0683] In this application, the use of the singular includes the plural unless specifically stated otherwise. It must be noted that, as used in the specification, the singular forms “a,” “an” and “the” include plural referents unless the context clearly dictates otherwise. Furthermore, use of the term “including” as well as other forms, such as “include”, “includes,” and “included,” is not limiting.

[0684] The terms “and/or” and “any combination thereof” and their grammatical equivalents as used herein, can be used interchangeably. These terms can convey that any combination is specifically contemplated. Solely for illustrative purposes, the following phrases “A, B, and/or C” or “A, B, C, or any combination thereof” can mean “A individually; B individually; C individually; A and B; B and C; A and C; and A, B, and C.”

[0685] The term “or” can be used conjunctively or disjunctively, unless the context specifically refers to a disjunctive use.

[0686] The term “about” or “approximately” means within an acceptable error range for the particular value as determined by one of ordinary skill in the art, which will depend in part on how the value is measured or determined, i.e., the limitations of the measurement system. For example, “about” can mean within 1 or more than 1 standard deviation, per the practice in the art. Alternatively, “about” can mean a range of up to 20%, up to 10%, up to 5%, or up to 1% of a given value. Alternatively, particularly with respect to biological systems or processes, the term can mean within an order of magnitude, preferably within 5-fold, and more preferably within 2-fold, of a value. Where particular values are described in the application and claims, unless otherwise stated the term “about” meaning within an acceptable error range for the particular value should be assumed.

[0687] As used in this specification and claim(s), the words “comprising” (and any form of comprising, such as “comprise” and “comprises”), “having” (and any form of having, such as “have” and “has”), “including” (and any form of including, such as “includes” and “include”) or “containing” (and any form of containing, such as “contains” and “contain”) are inclusive or open-ended and do not exclude additional, unrecited elements or method steps. It is contemplated that any embodiment discussed in this specification can be implemented with respect to any method or composition of the invention, and vice versa. Furthermore, compositions of the invention can be used to achieve methods of the invention.

[0688] As used herein the term “consisting essentially of” refers to those elements required for a given embodiment. The term permits the presence of elements that do not materially affect the basic and novel or functional characteristic(s) of that embodiment of the invention.

[0689] As used herein the term “consisting of” refers to compositions, methods, and respective components thereof as described herein, which are exclusive of any element not recited in that description of the embodiment.

[0690] Reference in the specification to “some embodiments,” “an embodiment,” “one embodiment” or “other embodiments” means that a particular feature, structure, or characteristic described in connection with the embodiments is included in at least some embodiments, but not necessarily all embodiments, of the inventions.

[0691] As used herein, the terms “protein”, “peptide” and “polypeptide” are used interchangeably to designate a series of amino acid residues connected to each other by peptide bonds between the alpha-amino and carboxy groups of adjacent residues. The terms “protein”, “peptide” and “polypeptide” refer to a polymer of amino acids, including modified amino acids (e.g., phosphorylated, glycated, glycosylated, etc.) and amino acid analogs, regardless of its size or function. “Protein” and “polypeptide” are often used in reference to relatively large polypeptides, whereas the term “peptide” is often used in reference to small polypeptides, but usage of these terms in the art overlaps. The terms “protein”, “peptide” and “polypeptide” are used interchangeably herein when referring to a gene product and fragments thereof. These terms encompass, e.g., native and artificial proteins, protein fragments and polypeptide analogs (such as muteins, variants, and fusion proteins) of a protein sequence as well as post-translationally, or otherwise covalently or non-covalently, modified proteins. A peptide, polypeptide, or protein may be monomeric or polymeric. A polypeptide can have the amino acid sequence of naturally occurring polypeptide from any mammal. Such native sequence polypeptide can be isolated from nature or can be produced by recombinant or synthetic means. In some embodiments, the polypeptide is a “variant”. “Variant” means a biologically active polypeptide having at least about 80% amino acid sequence identity with the native sequence polypeptide after aligning the sequences and introducing gaps, if necessary, to achieve the maximum percent sequence identity, and not considering any conservative substitutions as part of the sequence identity. Such variants include, for instance, polypeptides wherein one or more amino acid residues are added, or deleted, at the N- or C-terminus of the polypeptide. In some embodiments, a variant will have at least about 80% amino acid sequence identity. In some embodiments, a variant will have at least about 90% amino acid sequence identity. In some embodiments, a variant will have at least about 95% amino acid sequence identity with the native sequence polypeptide. A “derivative” of a polypeptide is a polypeptide (e.g., an antibody) that has been chemically modified, e.g., via conjugation to another chemical moiety (such as, for example, polyethylene glycol or albumin, e.g., human serum albumin), phosphorylation, and glycosylation

[0692] The term “fusion protein” as used herein refers to a polypeptide that comprises an amino acid sequence of an antibody or fragment thereof and an amino acid sequence of a heterologous polypeptide (i.e., an unrelated polypeptide).

[0693] The terms “synthetic polynucleotide,” “synthetic gene” or “synthetic polypeptide,” as used herein, mean that the corresponding polynucleotide sequence or portion thereof, or amino acid sequence or portion thereof, is derived, from a sequence that has been designed, or synthesized de novo, or modified, compared to an equivalent naturally-occurring sequence. Synthetic polynucleotides (antibodies or antigen-binding fragments) or synthetic genes can be prepared by methods known in the art, including but not limited to, the chemical synthesis of nucleic acid or amino acid sequences. Synthetic genes are typically different from naturally-occurring genes, either at the amino acid, or polynucleotide level, (or both) and are typically located within the context of synthetic expression control sequences. Synthetic gene polynucleotide sequences, may not necessarily encode proteins with different amino acids, compared to the natural gene; for example, they can also encompass synthetic polynucleotide sequences that incorporate different codons but which encode the same amino acid (i.e., the nucleotide changes represent silent mutations at the amino acid level).

[0694] Percent (%) sequence identity with respect to a reference polypeptide sequence is the percentage of amino acid residues in a candidate sequence that are identical with the amino acid residues in the reference polypeptide sequence, after aligning the sequences and introducing gaps, if necessary, to achieve the maximum percent sequence identity, and not considering any conservative substitutions as part of the sequence identity. Alignment for purposes of determining percent amino acid sequence identity can be achieved in various ways that are within the skill in the art, for instance, using publicly available computer software such as BLAST, BLAST-2, ALIGN or Megalign (DNASTAR®) software. Those skilled in the art can determine appropriate parameters for aligning sequences, including any algorithms needed to achieve maximal alignment over the full length of the sequences being compared. For purposes herein, however, % amino acid sequence identity values are generated using the sequence comparison computer program ALIGN-2. The ALIGN-2 sequence comparison computer program was authored by Genentech, Inc., and the source code has been filed with user documentation in the U.S. Copyright Office, Washington D.C., 20559, where it is registered under U.S. Copyright Registration No. TXU510087. The ALIGN-2 program is publicly available from Genentech, Inc., South San Francisco, Calif., or may be compiled from the source code. The ALIGN-2 program should be compiled for use on a UNIX operating system, including digital UNIX V4.0D. All sequence comparison parameters are set by the ALIGN-2 program and do not vary.

[0695] In situations where ALIGN-2 is employed for amino acid sequence comparisons, the % amino acid sequence identity of a given amino acid sequence A to, with, or against a given amino acid sequence B (which can alternatively be phrased as a given amino acid sequence A that has or comprises a certain % amino acid sequence identity to, with, or against a given amino acid sequence B) is calculated as follows: 100 times the fraction X/Y, where X is the number of amino acid residues scored as identical matches by the sequence alignment program ALIGN-2 in that program's alignment of A and B, and where Y is the total number of amino acid residues in B. It will be appreciated that where the length of amino acid sequence A is not equal to the length of amino acid sequence B, the % amino acid sequence identity of A to B will not equal the % amino acid sequence identity of B to A. Unless specifically stated otherwise, all % amino acid sequence identity values used herein are obtained as described in the immediately preceding paragraph using the ALIGN-2 computer program.

[0696] Antibody Terminology

[0697] As used herein, the term “antibody” refers to an immunoglobulin (Ig) whether natural or partly or wholly synthetically produced. The term also covers any polypeptide or protein having a binding domain which is, or is homologous to, an antigen-binding domain. The term further includes “antigen-binding fragments” and other interchangeable terms for similar binding fragments such as described below.

[0698] An antibody includes, but is not be limited to, any specific binding member, immunoglobulin class and/or isotype (e.g., IgG1, IgG2, IgG3, IgG4, IgM, IgA, IgD, IgE and IgM); and biologically relevant fragment or specific binding member thereof. Thus, an antibody includes, for example, monoclonal antibodies, chimeric antibodies, humanized antibodies, human antibodies, recombinant antibodies, chemically engineered antibodies, deimmunized antibodies, affinity-matured antibodies, multispecific antibodies (for example, bispecific antibodies and polyreactive antibodies), heteroconjugate antibodies, antibody fragments, and combinations thereof (e.g., a monoclonal antibody that is also deimmunized, a humanized antibody that is also deimmunized, etc.).

[0699] The present disclosure provides cancer associated antibodies that find use in treating and/or diagnosing cancer. The term “cancer associated antibody” as used herein refers to an antibody specific for a cancer associated antigen. In some embodiments, the cancer associated antibody comprises at least one antigen-binding region specific for a cancer associated antigen. Disclosed herein are the complete reconstructed nucleic acid consensus sequences and complete reconstructed polypeptide consensus sequences of the variable heavy chain (VH) and variable light chain (VL) of the antibodies. The nucleic acid and polypeptide sequences of the CDR3 of the VH and the VL are also provided.

[0700] Native antibodies and native immunoglobulins are usually heterotetrameric glycoproteins of about 150,000 Daltons, composed of two identical light (L) chains and two identical heavy (H) chains. Each light chain is typically linked to a heavy chain by one covalent disulfide bond, while the number of disulfide linkages varies among the heavy chains of different immunoglobulin isotypes. Each heavy and light chain also has regularly spaced intrachain disulfide bridges. Each heavy chain has at one end a variable domain (“VH”) followed by a number of constant domains (“CH”). Each light chain has a variable domain at one end (“VL”) and a constant domain (“CL”) at its other end; the constant domain of the light chain is aligned with the first constant domain of the heavy chain, and the light-chain variable domain is aligned with the variable domain of the heavy chain. Particular amino acid residues are believed to form an interface between the light- and heavy-chain variable domains.

[0701] The antibodies or antigen-binding fragment thereof of the present disclosure can comprise a deletion at an end of a light chain. The antibodies or antigen-binding fragment thereof of the invention can comprise a deletion of 3 or more amino acids at an end of the light chain. The antibodies or antigen-binding fragment thereof of the invention can comprise a deletion of 7 or less amino acids at an end of the light chain. The antibodies or antigen-binding fragment thereof of the invention can comprise a deletion of 3, 4, 5, 6, or 7 amino acids at an end of the light chain.

[0702] The antibodies or antigen-binding fragment thereof of the present disclosure can comprise an insertion in a light chain. The antibodies or antigen-binding fragment thereof of the invention can comprise an insertion of 1, 2, 3, 4, 5, 6, 7, 8, 9, or 10, or more amino acids in the light chain. The antibodies or antigen-binding fragment thereof of the invention can comprise an insertion of 3 amino acids in the light chain.

[0703] As used herein, “monoclonal antibody” refers to an antibody obtained from a population of substantially homogeneous antibodies, i.e., the individual antibodies comprising the population are identical except for possible naturally-occurring mutations that may be present in minor amounts. Monoclonal antibodies are highly specific, being directed against a single antigenic site. Furthermore, in contrast to polyclonal antibody preparations, which typically include different antibodies directed against different determinants (epitopes), each monoclonal antibody is directed against a single determinant on the antigen. The modifier “monoclonal” indicates the character of the antibody as being obtained from a substantially homogeneous population of antibodies and is not to be construed as requiring production of the antibody by any particular method. For example, the monoclonal antibodies to be used in accordance with the present invention may be made by the hybridoma method first described by Kohler and Milstein, 1975, Nature, 256:495, or may be made by recombinant DNA methods. The monoclonal antibodies may also be isolated from phage libraries generated using the techniques described in McCafferty et al., 1990, Nature, 348:552-554, for example.

[0704] As used herein, “humanized” antibodies refer to forms of non-human (e.g. murine) antibodies that are specific chimeric immunoglobulins, immunoglobulin chains, or fragments thereof (such as Fv, Fab, Fab′, F(ab′)2 or other antigen-binding subsequences of antibodies) that contain minimal sequence derived from non-human immunoglobulin. For the most part, humanized antibodies are human immunoglobulins (recipient antibody) in which residues from a complementary determining region (CDR) of the recipient are replaced by residues from a CDR of a non-human species (donor antibody) such as mouse, rat, or rabbit having the desired specificity, affinity, and capacity. In some instances, Fv framework region (FR) residues of the human immunoglobulin are replaced by corresponding non-human residues. Furthermore, the humanized antibody may comprise residues that are found neither in the recipient antibody nor in the imported CDR or framework sequences but are included to further refine and optimize antibody performance. In general, the humanized antibody will comprise substantially all of at least one, and typically two, variable domains, in which all or substantially all of the CDR regions correspond to those of a non-human immunoglobulin and all or substantially all of the FR regions are those of a human immunoglobulin consensus sequence. The humanized antibody optimally also will comprise at least a portion of an immunoglobulin constant region or domain (Fc), typically that of a human immunoglobulin. Other forms of humanized antibodies have one or more CDRs (one, two, three, four, five, six) which are altered with respect to the original antibody, which are also termed one or more CDRs “derived from” one or more CDRs from the original antibody.

[0705] As used herein, an “isolated antibody” is one that has been separated and/or recovered from a component of its natural environment. Contaminant components of its natural environment are materials that would interfere with diagnostic or therapeutic uses of the antibody, and may include enzymes, hormones, and other proteinaceous or non-proteinaceous components. In preferred embodiments, the antibody is purified: (1) to greater than 95% by weight of antibody as determined by the Lowry method, and most preferably more than 99% by weight; (2) to a degree sufficient to obtain at least 15 residues of N-terminal or internal amino acid sequence by use of a spinning cup sequenator; or (3) to homogeneity as shown by SDS-PAGE under reducing or non-reducing conditions and using Coomassie blue or, preferably, silver staining. Isolated antibody includes the antibody in situ within recombinant cells since at least one component of the antibody's natural environment will not be present. Ordinarily, however, isolated antibody will be prepared by at least one purification step.

[0706] As used herein, the term “Complementarity Determining Regions” (CDRs, i.e., CDR1, CDR2, and CDR3) refers to the amino acid residues of an antibody variable domain the presence of which are necessary for antigen binding. Each variable domain typically has three CDR regions identified as CDR1, CDR2 and CDR3. The CDRs of variable heavy chain can be CDR-H1, CDR-H2 and CDR-H3. The CDRs of variable light chain can be CDR-L1, CDR-L2 and CDR-L3. Exemplary hypervariable loops occur at amino acid residues 26-32 (L1), 50-52 (L2), 91-96 (L3), 26-32 (H1), 53-55 (H2), and 96-101 (H3). (Chothia and Lesk, J. Mol. Biol. 196:901-917 (1987)). Exemplary CDRs (CDR-L1, CDR-L2, CDR-L3, CDR-H1, CDR-H2, and CDR-H3) occur at amino acid residues 24-34 of L1, 50-56 of L2, 89-97 of L3, 31-35B of H1, 50-65 of H2, and 95-102 of H3 (Kabat et al., Sequences of Proteins of Immunological Interest, 5th ed. (1991)). Thus, the HVs may be comprised within the corresponding CDRs and references herein to the “hypervariable loops” of VH and VL domains should be interpreted as also encompassing the corresponding CDRs, and vice versa, unless otherwise indicated. The more highly conserved regions of variable domains are called the framework region (FR), as defined below. The variable domains of native heavy and light chains each comprise four FRs (FR1, FR2, FR3 and FR4, respectively), largely adopting a [beta]-sheet configuration, connected by the three hypervariable loops. The hypervariable loops in each chain are held together in close proximity by the FRs and, with the hypervariable loops from the other chain, contribute to the formation of the antigen-binding site of antibodies. Structural analysis of antibodies revealed the relationship between the sequence and the shape of the binding site formed by the complementarity determining regions (Chothia et al., J. Mol. Biol. 227: 799-817 (1992)); Tramontano et al., J. Mol. Biol, 215: 175-182 (1990)). Despite their high sequence variability, five of the six loops adopt just a small repertoire of main-chain conformations, called “canonical structures”. These conformations are first of all determined by the length of the loops and secondly by the presence of key residues at certain positions in the loops and in the framework regions that determine the conformation through their packing, hydrogen bonding or the ability to assume unusual main-chain conformations.

[0707] A “variable region” of an antibody refers to the variable region of the antibody light chain or the variable region of the antibody heavy chain, either alone or in combination. The variable regions of the heavy and light chain each consist of four framework regions (FR) connected by three complementarity determining regions (CDRs) also known as hypervariable regions. The CDRs in each chain are held together in close proximity by the FRs and, with the CDRs from the other chain, contribute to the formation of the antigen-binding site of antibodies. There are at least two techniques for determining CDRs: (1) an approach based on cross-species sequence variability (i.e., Kabat et al. Sequences of Proteins of Immunological Interest, (5th ed., 1991, National Institutes of Health, Bethesda Md.)); and (2) an approach based on crystallographic studies of antigen-antibody complexes (Allazikani et al. (1997) J. Molec. Biol. 273:927-948)). A CDR may refer to CDRs defined by either approach or by a combination of both approaches.

[0708] A “constant region” of an antibody refers to the constant region of the antibody light chain or the constant region of the antibody heavy chain, either alone or in combination. The constant region does not vary with respect to antigen specificity.

[0709] As used herein, the term “heavy chain region” includes amino acid sequences derived from the constant domains of an immunoglobulin heavy chain. A polypeptide comprising a heavy chain region comprises at least one of: a CH1 domain, a hinge (e.g., upper, middle, and/or lower hinge region) domain, a CH2 domain, a CH3 domain, or a variant or fragment thereof. In an embodiment, an antibody or an antigen-binding fragment thereof may comprise the Fc region of an immunoglobulin heavy chain (e.g., a hinge portion, a CH2 domain, and a CH3 domain). In another embodiment, an antibody or an antigen-binding fragment thereof lacks at least a region of a constant domain (e.g., all or part of a CH2 domain). In certain embodiments, at least one, and preferably all, of the constant domains are derived from a human immunoglobulin heavy chain. For example, in one preferred embodiment, the heavy chain region comprises a fully human hinge domain. In other preferred embodiments, the heavy chain region comprising a fully human Fc region (e.g., hinge, CH2 and CH3 domain sequences from a human immunoglobulin). In certain embodiments, the constituent constant domains of the heavy chain region are from different immunoglobulin molecules. For example, a heavy chain region of a polypeptide may comprise a domain derived from an IgG1 molecule and a hinge region derived from an IgG3 or IgG4 molecule. In other embodiments, the constant domains are chimeric domains comprising regions of different immunoglobulin molecules. For example, a hinge may comprise a first region from an IgG1 molecule and a second region from an IgG3 or IgG4 molecule. As set forth above, it will be understood by one of ordinary skill in the art that the constant domains of the heavy chain region may be modified such that they vary in amino acid sequence from the naturally occurring (wild-type) immunoglobulin molecule. That is, the polypeptides of the invention disclosed herein may comprise alterations or modifications to one or more of the heavy chain constant domains (CH1, hinge, CH2 or CH3) and/or to the light chain constant domain (CL). Exemplary modifications include additions, deletions or substitutions of one or more amino acids in one or more domains.

[0710] The antibodies or antigen-binding fragment thereof of the present disclosure can comprise a CDR3 region that is a length of at least about 10, 11, 12, 13, 14, 15, 16, 17, 18, 19, 20, 21, 22, 23, 24, 25, 26, 27, 28, 29, or 30 amino acids in length. The antibodies or antigen-binding fragment thereof of the present disclosure can comprise a CDR3 region that is at least about 18 amino acids in length. In some embodiments, the CDR3 region comprises a CDR-H3 region. In some embodiments, the CDR3 region comprises a CDR-L3 region.

[0711] As used herein, the term “hinge region” includes the region of a heavy chain molecule that joins the CH1 domain to the CH2 domain. This hinge region comprises approximately 25 residues and is flexible, thus allowing the two N-terminal antigen-binding regions to move independently. Hinge regions can be subdivided into three distinct domains: upper, middle, and lower hinge domains (Roux et al. J. Immunol. 1998 161:4083).

[0712] As used herein, the term “Fv” is the minimum antibody fragment that contains a complete antigen-recognition and -binding site. This fragment consists of a dimer of one heavy- and one light-chain variable region domain in tight, non-covalent association.

[0713] “Heavy chain variable region” or “VH” with regard to an antibody refers to the fragment of the heavy chain that contains three CDRs interposed between flanking stretches known as framework regions, these framework regions are generally more highly conserved than the CDRs and form a scaffold to support the CDRs.

[0714] Six hypervariable loops (three loops each from the H and L chain) contribute the amino acid residues for antigen-binding and confer antigen-binding specificity to the antibody. However, even a single variable domain (or half of an Fv comprising only three CDRs specific for an antigen) has the ability to recognize and bind antigen, although at a lower affinity than the entire binding site.

[0715] “Framework” or FR residues are those variable domain residues other than the hypervariable region residues.

[0716] It is understood in the art that an antibody is a glycoprotein having at least two heavy (H) chains and two light (L) chains interconnected by disulfide bonds, or an antigen-binding portion thereof. A heavy chain is comprised of a heavy chain variable region (VH) and a heavy chain constant region (CH1, CH2 and CH3). A light chain is comprised of a light chain variable region (VL) and a light chain constant region (CL). The variable regions of both the heavy and light chains comprise framework regions (FRs or FWRs) and hypervariable regions (HVRs). The HVRs are the amino acid residues of an antibody that are responsible for antigen binding. The hypervariable region generally comprises amino acid residues from a complementarity determining region (CDR), which have the highest sequence variability and/or involved in antigen recognition. With the exception of CDR1 in VH, CDRs generally comprise the amino acid residues that form the hypervariable loops. CDRs also comprise “specificity determining residues,” or “SDRs,” which are residues that contact antigen. SDRs are contained within regions of the CDRs called abbreviated-CDRs, or a-CDRs. Exemplary a-CDRs (a-CDR-L1, a-CDR-L2, a-CDR-L3, a-CDR-H1, a-CDR-H2, and a-CDR-H3) occur at amino acid residues 31-34 of L1, 50-55 of L2, 89-96 of L3, 31-35B of H1, 50-58 of H2, and 95-102 of H3. (See, e.g., Fransson, Front. Biosci. 13:1619-1633 (2008).)

[0717] Unless otherwise indicated, HVR residues and other residues in the variable domain (e.g., FR residues) are numbered herein according to Kabat et al., supra. A variable region is a domain of an antibody heavy or light chain that is involved in binding the antibody to antigen. (See, e.g., Kindt et al. Kuby Immunology, 6th ed., W.H. Freeman and Co., p. 91 (2007)). A single VH or VL domain may be sufficient to confer antigen-binding specificity. Furthermore, antibodies that bind a particular antigen may be isolated using a VH or VL domain from an antibody that binds the antigen to screen a library of complementary VL or VH domains, respectively. (See, e.g., Portolano et al., J. Immunol. 150:880-887 (1993); Clarkson et al., Nature 352:624-628 (1991)). The four FWR regions are typically more conserved while CDR regions (CDR1, CDR2 and CDR3) represent hypervariable regions and are arranged from NH2 terminus to the COOH terminus as follows: FWR1, CDR1, FWR2, CDR2, FWR3, CDR3, and FWR4. The variable regions of the heavy and light chains contain a binding domain that interacts with an antigen while, depending of the isotype, the constant region(s) may mediate the binding of the immunoglobulin to host tissues or factors. An antibody also includes chimeric antibodies, humanized antibodies, and recombinant antibodies, human antibodies generated from a transgenic non-human animal, as well as antibodies selected from libraries using enrichment technologies available to the artisan.

[0718] The term “antibody heavy chain,” refers to the larger of the two types of polypeptide chains present in antibody molecules in their naturally occurring conformations, and which normally determines the class to which the antibody belongs.

[0719] The term “antibody light chain,” refers to the smaller of the two types of polypeptide chains present in antibody molecules in their naturally occurring conformations. Kappa (“κ”) and lambda (“λ”) light chains refer to the two major antibody light chain isotypes.

[0720] An antibody or antigen-binding fragment thereof “specifically binds” or “preferentially binds” to a target if it binds with greater affinity and/or avidity than it binds to epitopes on unrelated polypeptides. The specificity of an antibody or antigen-binding fragment or portion thereof can be determined based on affinity and/or avidity. Methods to determine such specific binding are also well known in the art. According to certain embodiments of the present disclosure, the antibodies or antigen-binding fragment thereof can bind to a human cancer antigen but not to a cancer antigen from other species. Alternatively, the antibodies or antigen-binding fragment thereof, in certain embodiments, bind to human cancer antigen and to cancer antigen from one or more non-human species. For example, the antibodies or antigen-binding fragment thereof can bind to human cancer antigen and can bind or not bind, as the case may be, to one or more of mouse, rat, guinea pig, hamster, gerbil, pig, cat, dog, rabbit, goat, sheep, cow, horse, camel, cynomologous, marmoset, rhesus or chimpanzee cancer antigen.

[0721] The affinity, represented by the equilibrium constant for the dissociation (K_{D}) of an antigen with an antigen-binding protein, is a measure for the binding strength between an antigenic determinant and an antigen-binding site on the antigen-binding protein: the lesser the value of the K_{D}, the stronger the binding strength between an antigenic determinant and the antigen-binding molecule. Alternatively, the affinity can also be expressed as the affinity constant (KA), which is 1/K_{D}). Unless indicated otherwise, as used herein, “binding affinity” refers to intrinsic binding affinity which reflects a 1:1 interaction between members of a binding pair (e.g., antibody and antigen). As will be clear to the skilled person, affinity can be determined in a manner known per se, depending on the specific antigen of interest. Accordingly, an antibody or antigen-binding fragment thereof as defined herein is said to be “specific for” a first target or antigen compared to a second target or antigen when it binds to the first antigen with an affinity (as described above, and suitably expressed, for example as a K_{D} value) that is at least 50 times, such as at least 100 times, and preferably at least 1000 times, and up to 10,000 times or more better than the affinity with which said amino acid sequence or polypeptide binds to another target or polypeptide. Preferably, when an antibody or antigen-binding fragment thereof is “specific for” a target or antigen, compared to another target or antigen, it can bind the target or antigen, but does not bind the other target or antigen. However, as understood by one of ordinary skill in the art, in some embodiments, where a binding site on a target is shared or partially shared by multiple, different ligands, an antibody or antigen-binding fragment thereof can specifically bind to a target, such as cancer associated antigen, and have the functional effect of, for example, inhibiting/preventing tumor progression.

[0722] In some embodiments, an antibody provided herein has a dissociation constant (K_{D}) of about 1 μM, 100 nM, 10 nM, 5 nM, 2 nM, 1 nM, 0.5 nM, 0.1 nM, 0.05 nM, 0.01 nM, or 0.001 nM or less (e.g., 10⁻⁸ M or less, e.g., from 10⁻⁸M to 10⁻¹³M, e.g., from 10⁻⁹M to 10⁻¹³ M). Another aspect of the invention provides for an antibody or antigen-binding fragment thereof with an increased affinity for its target, for example, an affinity matured antibody. An affinity matured antibody is an antibody with one or more alterations in one or more hypervariable regions (HVRs), compared to a parent antibody which does not possess such alterations, such alterations resulting in an improvement in the affinity of the antibody for antigen. These antibodies can bind to antigen with a K_{D} of about 5×10⁻⁹ M, 2×10⁻⁹ M, 1×10⁻⁹ M, 5×10⁻⁹M, 2×10⁻⁹M, 1×10⁻¹⁰ M, 5×10⁻¹¹M, 1×10⁻¹¹ M, 5×10⁻¹² M, 1×10⁻¹² M, or less. In some embodiments, the present disclosure provides an antibody or antigen-binding fragment thereof which has an increased affinity of at least 1.5 fold, 2 fold, 2.5 fold, 3 fold, 4 fold, 5 fold, 10 fold, 20 fold or greater as compared to a germline antibody containing the heavy chain sequence and light chain sequence, or both. In other embodiments, an antibody is provided that competes for binding to the same epitope as an antibody as described herein. In some embodiments, the antibody or antigen-binding fragment thereof that binds to the same epitope, and/or competes for binding to the same epitope as an antibody exhibits effector function activities, such as, for example, Fc-mediated cellular cytotoxicity, including ADCC activity.

[0723] K_{D} can be measured by any suitable assay. For example, K_{D} can be measured by a radiolabeled antigen-binding assay (RIA) (See, e.g., Chen et al., J. Mol. Biol. 293:865-881 (1999); Presta et al., Cancer Res. 57:4593-4599 (1997)). For example, K_{D} can be measured using a surface plasmon resonance assay (e.g., using a BIACORE®-2000 or a BIACORE®-3000). For example, K_{D} can be measured using a competitive ELISA.

[0724] Avidity is the measure of the strength of binding between an antigen-binding molecule and the pertinent antigen. Avidity is related to both the affinity between an antigenic determinant and its antigen binding site on the antigen-binding molecule, and the number of pertinent binding sites present on the antigen-binding molecule. Typically, antigen-binding proteins will bind to their cognate or specific antigen with a dissociation constant (K_{D} of 10⁻⁵ to 10¹² moles/liter or less, and preferably 10⁻⁷ to 10⁻¹² moles/liter or less and more preferably 10-8 to 10-12 moles/liter (i.e. with an association constant (KA) of 10⁵ to 10¹² liter/moles or more, and preferably 10⁷ to 10¹² liter/moles or more and more preferably 10⁸ to 10¹² liter/moles). Any K_{D} value greater than 10⁻⁴ mol/liter (or any KA value lower than 104 M⁻¹) is generally considered to indicate non-specific binding. The K_{D} for biological interactions which are considered meaningful (e.g., specific) are typically in the range of 10⁻¹⁰ M (0.1 nM) to 10⁻⁵ M (10000 nM). The stronger an interaction is, the lower is its K_{D}. Preferably, a binding site on an anti-LAP antibody or antigen-binding fragment thereof described herein will bind with an affinity less than 500 nM, preferably less than 200 nM, more preferably less than 10 nM, such as less than 500 pM. Specific binding of an antigen-binding protein to an antigen or antigenic determinant can be determined in any suitable manner known per se, including, for example, Scatchard analysis and/or competitive binding assays, such as radioimmunoassays (RIA), enzyme immunoassays (EIA) and sandwich competition assays, and the different variants thereof known per se in the art; as well as other techniques as mentioned herein.

[0725] The term “kon”, as used herein, is intended to refer to the rate constant for association of an antibody or antigen-binding fragment thereof to an antigen.

[0726] The term “Koff”, as used herein, is intended to refer to the rate constant for dissociation of an antibody or antigen-binding fragment thereof from the antibody/antigen complex.

[0727] In the context of an antibody or antigen-binding fragment thereof, the term “specificity” or “specific for” refers to the number of different types of antigens or antigenic determinants to which a particular antibody or antigen-binding fragment thereof can bind. The specificity of an antibody or antigen-binding fragment or portion thereof can be determined based on affinity and/or avidity. The affinity, represented by the equilibrium constant for the dissociation (K_{D}) of an antigen with an antigen-binding protein, is a measure for the binding strength between an antigenic determinant and an antigen-binding site on the antigen-binding protein: the lesser the value of the K_{D}, the stronger the binding strength between an antigenic determinant and the antigen-binding molecule. Alternatively, the affinity can also be expressed as the affinity constant (KA), which is 1/K_{D}). As will be clear to the skilled person, affinity can be determined in a manner known per se, depending on the specific antigen of interest. Accordingly, an antibody or antigen-binding fragment thereof as defined herein is said to be “specific for” a first target or antigen compared to a second target or antigen when it binds to the first antigen with an affinity (as described above, and suitably expressed, for example as a K_{D} value) that is at least 50 times, such as at least 100 times, and preferably at least 1000 times, and up to 10,000 times or more better than the affinity with which said amino acid sequence or polypeptide binds to another target or polypeptide. Preferably, when an antibody or antigen-binding fragment thereof is “specific for” a target or antigen, compared to another target or antigen, it can bind the target or antigen, but does not bind the other target or antigen.

[0728] However, as understood by one of ordinary skill in the art, in some embodiments, where a binding site on a target is shared or partially shared by multiple, different ligands, an antibody or antigen binding fragment thereof can specifically bind to a target, such as cancer associated antigen, and have the functional effect of, for example, inhibiting/preventing tumor progression.

[0729] The term “fusion protein” as used herein refers to a polypeptide that comprises an amino acid sequence of an antibody or fragment thereof and an amino acid sequence of a heterologous polypeptide (i.e., an unrelated polypeptide).

[0730] While preferred embodiments of the present invention have been shown and described herein, it will be obvious to those skilled in the art that such embodiments are provided by way of example only. Numerous variations, changes, and substitutions will now occur to those skilled in the art without departing from the invention. It should be understood that various alternatives to the embodiments of the invention described herein may be employed in practicing the invention. It is intended that the following claims define the scope of the invention and that methods and structures within the scope of these claims and their equivalents be covered thereby.

[0731] In some embodiments, the antibody or antigen binding fragment thereof of the present disclosure is a single domain antibody. The expression “single domain antibody” (sdAbs) or “single variable domain (SVD) antibody” generally refers to a single variable region (VH or ‘) wherein the antibody-antigen binding can be imparted. In other words, single variable domain does not need to recognize the target antigen by interacting with another variable region. A single domain antibody monomers single arm antigen binding by each antibody variable region (VH*VJ composition. Examples of single domain antibodies include those derived from camelids (camels and llamas) and cartilaginous fish (e.g. nurse sharks) antibodies and those antibodies (Ward et al from human and mouse antibodies by recombinant methods, Nature (1989) 341: 544-546; Dooley and Flajnik, Dev Comp Immunol (2006) 30: 43-56; Muyldermans et, TrendBiochem Sci (2001) 26: 230-235; Holt et, Trends Biotechnol (2003): 21: 484-490; W0 2005/035572; TO 03/035694; Davies and Riechmann, Febs Lett (1994) 339: 285-290; W000/29 004; W0 02/051870) and a single variable region of an antibody can be other than a single domain antibody variable regions or variable domains are present in an antigen binding arm (e.g., homo- or hetero-multimer together).

### Monoclonal Antibodies

[0732] A monoclonal antibody is obtained from a population of substantially homogeneous antibodies, i.e., the individual antibodies comprising the population are identical except for possible naturally occurring mutations that may be present in minor amounts.

[0733] In some embodiments, the antibodies of the present disclosure are monoclonal. Monoclonal antibodies may be made using the hybridoma method first described by Kohler et al., Nature, 256:495 (1975), or may be made by recombinant DNA methods.

[0734] In the hybridoma method, a mouse or other appropriate host animal, such as a hamster or macaque monkey, is immunized as herein described to elicit lymphocytes that produce or are capable of producing antibodies that will specifically bind to the protein used for immunization. Alternatively, lymphocytes may be immunized in vitro. Lymphocytes then are fused with myeloma cells using a suitable fusing agent, such as polyethylene glycol, to form a hybridoma cell (Goding, Monoclonal Antibodies: Principles and Practice, pp. 59-103 (Academic Press, 1986)). The hybridoma cells thus prepared are seeded and grown in a suitable culture medium that preferably contains one or more substances that inhibit the growth or survival of the unfused, parental myeloma cells. For example, if the parental myeloma cells lack the enzyme hypoxanthine guanine phosphoribosyl transferase (HGPRT or HPRT), the culture medium for the hybridomas typically will include hypoxanthine, aminopterin, and thymidine (HAT medium), which substances prevent the growth of HGPRT-deficient cells. Preferred myeloma cells are those that fuse efficiently, support stable high-level production of antibody by the selected antibody-producing cells, and are sensitive to a medium. Human myeloma and mouse-human heteromyeloma cell lines also have been described for the production of human monoclonal antibodies (Kozbor, J. Immunol., 133: 3001 (1984); Brodeur et al., Monoclonal Antibody Production Techniques and Applications, pp. 51-63 (Marcel Dekker, Inc., New York, 1987)). Exemplary murine myeloma lines include those derived from MOP-21 and M.C.-11 mouse tumors available from the Salk Institute Cell Distribution Center, San Diego, Calif. USA, and SP-2 or X63-Ag8-653 cells available from the American Type Culture Collection, Rockville, Md. USA. Culture medium in which hybridoma cells are growing is assayed for production of monoclonal antibodies directed against the antigen. Accordingly, in one aspect the present disclosure provides a hybridoma producing the antibody or antigen-binding fragment thereof, described herein. Preferably, the binding specificity of monoclonal antibodies produced by hybridoma cells is determined by immunoprecipitation or by an in vitro binding assay, such as radioimmunoassay (RIA) or enzyme-linked immunoabsorbent assay (ELISA). The binding affinity of the monoclonal antibody can, for example, be determined by Scatchard analysis (Munson et al., Anal. Biochem., 107:220 (1980)).

[0735] After hybridoma cells are identified that produce antibodies of the desired specificity, affinity, and/or activity, the clones may be subcloned by limiting dilution procedures and grown by standard methods (Goding, Monoclonal Anti-bodies: Principles and Practice, pp. 59-103 (Academic Press, 1986)). Suitable culture media for this purpose include, for example, D-MEM or RPMI-1640 medium. In addition, the hybridoma cells may be grown in vivo as ascites tumors in an animal. The monoclonal antibodies secreted by the subclones are suitably separated from the culture medium, ascites fluid, or serum by conventional immunoglobulin purification procedures such as, for example, protein A-Sepharose, hydroxylapatite chromatography, gel electrophoresis, dialysis, or affinity chromatography.

### Chimeric Antibodies

[0736] In some embodiments, an antibody provided herein is a chimeric. A chimeric antibody is an antibody in which a portion of the heavy and/or light chain is derived from a particular source or species, while the remainder of the heavy and/or light chain is derived from a different source or species. In one example, a chimeric antibody comprises a non-human variable region (e.g., a variable region derived from a mouse, rat, hamster, rabbit, or non-human primate, such as a monkey) and a human constant region. In a further example, a chimeric antibody is a “class switched” antibody in which the class or subclass has been changed from that of the parent antibody. Chimeric antibodies include antigen-binding fragments thereof. For details, see, for example, Jones et al., Nature 321: 522-525 (1986); Reichmann et al., Nature 332: 323-329 (1988); Presta, Curr. Op. Struct. Biol., 2: 593-596 (1992); and Morrison et al., Proc. Natl. Acad. Sci. USA, 81:6851-6855 (1984).

### Humanized Antibodies

[0737] In some embodiments, an antibody provided herein is a humanized antibody. In one embodiment, a humanized antibody is an antibody comprising amino acid residues from non-human HVRs and amino acid residues from human FRs. In certain embodiments, a humanized antibody will comprise substantially all of at least one, and typically two, variable domains, in which all or substantially all of the HVRs (e.g., CDRs) correspond to those of a non-human antibody, and all or substantially all of the FRs correspond to those of a human antibody. A humanized antibody optionally may comprise at least a portion of an antibody constant region derived from a human antibody. See, e.g., Almagro and Fransson, Front. Biosci. 13:1619-1633 (2008); Riechmann et al., Nature 332:323-329 (1988); Queen et al., Proc. Nat'l Acad. Sci. USA 86:10029-10033 (1989); Kashmiri et al., Methods 36:25-34 (2005); Padlan, Mol. Immunol. 28:489-498 (1991); Dall'Acqua et al., Methods 36:43-60 (2005); Osbourn et al., Methods 36:61-68 (2005); and Klimka et al., Br. J. Cancer, 83:252-260 (2000).

[0738] A non-human antibody can be humanized to reduce immunogenicity to humans, while retaining the specificity and affinity of the parental non-human antibody. A humanized antibody can comprise one or more variable domains comprising one or more CDRs, or portions thereof, derived from a non-human antibody. A humanized antibody can comprise one or more variable domains comprising one or more FRs, or portions thereof, derived from human antibody sequences. A humanized antibody can optionally comprise at least a portion of a human constant region. In some embodiments, one or more FR residues in a humanized antibody are substituted with corresponding residues from a non-human antibody (e.g., the antibody from which the CDR residues are derived), e.g., to restore or improve antibody specificity or affinity. Human framework regions that may be used for humanization include but are not limited to: framework regions selected using a “best-fit” method; framework regions derived from the consensus sequence of human antibodies of a particular subgroup of light or heavy chain variable regions; human mature (somatically mutated) framework regions or human germline framework regions; and framework regions derived from screening FR libraries (See, e.g., Sims et al., J. Immunol. 151:2296 (1993); Carter et al. Proc. Natl. Acad. Sci. USA, 89:4285 (1992); Presta et al., J. Immunol., 151:2623 (1993); Baca et al., J. Biol. Chem. 272:10678-10684 (1997); and Rosok et al., J. Biol. Chem. 271:22611-22618 (1996)).

### Human Antibodies

[0739] In some embodiments, an antibody provided herein is a human antibody. Human antibodies can be produced using various techniques known in the art (See, e.g., van Dijk and van de Winkel, Curr. Opin. Pharmacol. 5: 368-74 (2001); and Lonberg, Curr. Opin. Immunol. 20:450-459 (2008)). A human antibody is one which possesses an amino acid sequence which corresponds to that of an antibody produced by a human or a human cell or derived from a non-human source that utilizes human antibody repertoires or other human antibody-encoding sequences. This definition of a human antibody specifically excludes a humanized antibody comprising non-human antigen-binding residues. Human antibodies may be prepared by administering an immunogen (e.g., a cancer cell antigen) to a transgenic animal that has been modified to produce intact human antibodies or intact antibodies with human variable regions in response to antigenic challenge. (See, e.g., Lonberg, Nat. Biotech. 23:1117-1125 (2005)). Human variable regions from intact antibodies generated by such animals may be further modified, e.g., by combining with a different human constant region. Human antibodies can also be made by hybridoma-based methods. For example, human antibodies can be produced from human myeloma and mouse-human heteromyeloma cell lines, using human B-cell hybridoma technology, and other methods (See, e.g., Kozbor J. Immunol., 133: 3001 (1984); Brodeur et al., Monoclonal Antibody Production Techniques and Applications, pp. 51-63 (1987); Boerner et al., J. Immunol., 147: 86 (1991); Li et al., Proc. Natl. Acad. USA, 103:3557-3562 (2006); Ni, Xiandai Mianyixue, 26(4):265-268 (2006); Vollmers and Brandlein, Histology and Histopathology, 20(3):927-937 (2005); and Vollmers and Brandlein, Methods and Findings in Experimental and Clinical Pharmacology, 27(3):185-91 (2005)). Human antibodies may also be generated by isolating Fv clone variable domain sequences selected from human-derived phage display libraries. Such variable domain sequences may then be combined with a desired human constant domain.

### Deimmunized Antibodies

[0740] An antibody or an antigen-binding fragment thereof described herein can be optionally assessed for immunogenicity and, as needed, be deimmunized (i.e., the antibody is made less immunoreactive by altering one or more T cell epitopes). As used herein, a “deimmunized antibody” means that one or more T cell epitopes in an antibody sequence have been modified such that a T cell response after administration of the antibody to a subject is reduced compared to an antibody that has not been deimmunized, yet the antibody retains its binding activity. Analysis of immunogenicity and T-cell epitopes present in the antibodies and antigen-binding fragments described herein can be carried out via the use of software and specific databases known in the art. Exemplary software and databases include iTope™ developed by Antitope of Cambridge, England. iTope™, is an in silico technology for analysis of peptide binding to human MHC class II alleles. The iTope™ software predicts peptide binding to human MHC class II alleles and thereby provides an initial screen for the location of such “potential T cell epitopes.” iTope™ software predicts favorable interactions between amino acid side chains of a peptide and specific binding pockets within the binding grooves of 34 human MHC class II alleles. The location of key binding residues is achieved by the in silico generation of 9mer peptides that overlap by one amino acid spanning the test antibody variable region sequence. Each 9mer peptide can be tested against each of the 34 MHC class II allotypes and scored based on their potential “fit” and interactions with the MHC class II binding groove. Peptides that produce a high mean binding score (>0.55 in the iTope™ scoring function) against >50% of the MHC class II alleles are considered as potential T cell epitopes. In such regions, the core 9 amino acid sequence for peptide binding within the MHC class II groove is analyzed to determine the MHC class II pocket residues (P1, P4, P6, P7 and P9) and the possible T cell receptor (TCR) contact residues (P-1, P2, P3, P5, P8). After identification of any T-cell epitopes, amino acid residue changes, substitutions, additions, and/or deletions can be introduced to remove the identified T-cell epitope. Such changes can be made so as to preserve antibody structure and function while still removing the identified epitope. Exemplary changes can include, but are not limited to, conservative amino acid changes.

### Engineered and Modified Antibodies

[0741] An antibody according to at least some embodiments of the invention further can be prepared using an antibody having one or more of the VH and/or VL sequences derived from an antibody or antigen-binding fragment thereof, disclosed herein, starting material to engineer a modified antibody, which modified antibody may have altered properties from the starting antibody. Provided herein are complete reconstructed amino acid and nucleic acid consensus sequences of VH and VL chain regions of antibodies disclosed herein. Also provided herein, are the amino acid and nucleic acid sequences of the CDR3 regions of the VH and VL of the antibodies, described herein. An antibody can be engineered by modifying one or more residues within one or both variable regions (i.e., VH and/or VL), for example within one or more CDR regions and/or within one or more framework regions. Additionally or alternatively, an antibody can be engineered by modifying residues within the constant regions, for example to alter the effector functions of the antibody.

[0742] One type of variable region engineering that can be performed is CDR grafting. Antibodies interact with target antigens predominantly through amino acid residues that are located in the six heavy and light chain complementarity determining regions (CDRs). For this reason, the amino acid sequences within CDRs are more diverse between individual antibodies than sequences outside of CDRs. Because CDR sequences are responsible for most antibody-antigen interactions, it is possible to express recombinant antibodies that mimic the properties of specific antibodies by constructing expression vectors that include CDR sequences from the specific antibody (e.g., antibodies disclosed herein) grafted onto framework sequences from a different antibody with different properties (see, e.g., Riechmann, L. et al. (1998) Nature 332:323-327; Jones, P. et al. (1986) Nature 321:522-525; Queen, C. et al. (1989) Proc. Natl. Acad. See. U.S.A. 86:10029-10033; U.S. Pat. No. 5,225,539 to Winter, and U.S. Pat. Nos. 5,530,101; 5,585,089; 5,693,762 and 6,180,370 to Queen et al.)

[0743] Suitable framework sequences can be obtained from public DNA databases or published references that include germline antibody gene sequences. For example, germline DNA sequences for human heavy and light chain variable region genes can be found in the “VBase” human germline sequence database (available on the Internet), as well as in Kabat, E. A., et al. (1991) Sequences of Proteins of Immunological Interest, Fifth Edition, U.S. Department of Health and Human Services, NIH Publication No. 91-3242; Tomlinson, I. M., et al. (1992) “The Repertoire of Human Germline VH Sequences Reveals about Fifty Groups of VH Segments with Different Hypervariable Loops” J. Mol. Biol. 227:776-798; and Cox, J. P. L. et al. (1994) “A Directory of Human Germ-line VH Segments Reveals a Strong Bias in their Usage” Eur. J. Immunol. 24:827-836; the contents of each of which are expressly incorporated herein by reference. Another type of variable region modification is to mutate amino acid residues within the VH and/or VL CDR 1, CDR2 and/or CDR3 regions to thereby improve one or more binding properties (e.g., affinity) of the antibody of interest. Site-directed mutagenesis or PCR-mediated mutagenesis can be performed to introduce the mutations and the effect on antibody binding, or other functional property of interest, can be evaluated in appropriate in vitro or in vivo assays. Preferably conservative modifications (as discussed above) are introduced. The mutations may be amino acid substitutions, additions or deletions, but are preferably substitutions. Moreover, typically no more than one, two, three, four or five residues within a CDR region are altered.

[0744] Engineered antibodies according to at least some embodiments of the invention include those in which modifications have been made to framework residues within VH and/or VL, e.g. to improve the properties of the antibody. Typically such framework modifications are made to decrease the immunogenicity of the antibody. For example, one approach is to “backmutate” one or more framework residues to the corresponding germline sequence. More specifically, an antibody that has undergone somatic mutation may contain framework residues that differ from the germline sequence from which the antibody is derived. Such residues can be identified by comparing the antibody framework sequences to the germline sequences from which the antibody is derived.

[0745] In addition or alternative to modifications made within the framework or CDR regions, antibodies according to at least some embodiments of the disclosure may be engineered to include modifications within the Fc region, typically to alter one or more functional properties of the antibody, such as serum half-life, complement fixation, Fc receptor binding, and/or antigen-dependent cellular cytotoxicity. Furthermore, an antibody according to at least some embodiments of the invention may be chemically modified (e.g., one or more chemical moieties can be attached to the antibody) or be modified to alter its glycosylation, again to alter one or more functional properties of the antibody. Such embodiments are described above. The numbering of residues in the Fc region is that of the EU index of Kabat.

[0746] In one embodiment, the hinge region of CH1 is modified such that the number of cysteine residues in the hinge region is altered, e.g., increased or decreased. This approach is described further in U.S. Pat. No. 5,677,425 by Bodmer et al. The number of cysteine residues in the hinge region of CH1 is altered to, for example, facilitate assembly of the light and heavy chains or to increase or decrease the stability of the antibody. In another embodiment, the Fc hinge region of an antibody is mutated to decrease the biological half-life of the antibody. More specifically, one or more amino acid mutations are introduced into the CH2-CH3 domain interface region of the Fc-hinge fragment such that the antibody has impaired Staphylococcyl protein A (SpA) binding relative to native Fc-hinge domain SpA binding. This approach is described in further detail in U.S. Pat. No. 6,165,745 by Ward et al.

[0747] In another embodiment, the antibody is modified to increase its biological half-life. Various approaches are possible. For example, to increase the biological half-life, the antibody can be altered within the CH1 or CL region to contain a salvage receptor binding epitope taken from two loops of a CH2 domain of an Fc region of an IgG, as described in U.S. Pat. Nos. 5,869,046 and 6,121,022 by Presta et al.

### Recombinant Human Antibodies

[0748] The term “recombinant human antibody”, as used herein, includes all human antibodies that are prepared, expressed, created or isolated by recombinant means, such as (a) antibodies isolated from an animal (e.g., a mouse) that is transgenic or transchromosomal for human immunoglobulin genes or a hybridoma prepared therefrom (described further below), (b) antibodies isolated from a host cell transformed to express the human antibody, e.g., from a transfectoma, (c) antibodies isolated from a recombinant, combinatorial human antibody library, and (d) antibodies prepared, expressed, created or isolated by any other means that involve splicing of human immunoglobulin gene sequences to other DNA sequences. Such recombinant human antibodies have variable regions in which the framework and CDR regions are derived from reconstructed immunoglobulin consensus sequences, disclosed herein. In certain embodiments, however, such recombinant human antibodies can be subjected to in vitro mutagenesis (or, when an animal transgenic for human Ig sequences is used, in vivo somatic mutagenesis) and thus the amino acid sequences of the VH and VL regions of the recombinant antibodies are sequences that, while derived from and related to human immunoglobulin VH and VL sequences, may not naturally exist within the human antibody germline repertoire in vivo.

### Antigen-Binding Fragments

[0749] The terms “antibody fragment,” “antigen-binding fragment,” or “antibody binding domain” refer to at least one portion of an antibody, or recombinant variants thereof, that contains the antigen-binding domain, i.e., an antigenic determining variable region of an intact antibody, that is sufficient to confer recognition and specific binding of the antibody fragment to a target, such as an antigen and its defined epitope. Examples of antigen-binding fragments include, but are not limited to, Fab, Fab′, F(ab′)2, and Fv fragments, single-chain (sc)Fv (“scFv”) antibody fragments, linear antibodies, single domain antibodies such as sdAb (either VL or VH), camelid VHH domains, and multi-specific antibodies formed from antibody fragments. Antibody fragments can be made by various techniques, including but not limited to proteolytic digestion of an intact antibody as well as production by recombinant host cells (e.g., E. coli or phage), as described herein.

[0750] An Fv is the minimum antibody fragment that contains a complete antigen-recognition and antigen-binding site. This fragment contains a dimer of one heavy- and one light-chain variable region domain in tight, non-covalent association. From the folding of these two domains emanate six hypervariable loops (three loops each from the H and L chain) that contribute the amino acid residues for antigen-binding and confer antigen-binding specificity to the antibody. However, even a single variable region (or half of an Fv comprising only three CDRs specific for an antigen) has the ability to recognize and bind antigen, although at a lower affinity than the entire binding site.

[0751] The term “scFv” refers to a fusion protein comprising at least one antibody fragment comprising a variable region of a light chain and at least one antibody fragment comprising a variable region of a heavy chain, wherein the light and heavy chain variable regions are contiguously linked via a short flexible polypeptide linker, and capable of being expressed as a single polypeptide chain, and wherein the scFv retains the specificity of the intact antibody from which it is derived. Unless specified, as used herein a scFv may have the VL and VH variable regions in either order, e.g., with respect to the N-terminal and C-terminal ends of the polypeptide, the scFv may comprise VL-linker-VH or may comprise VH-linker-VL.

[0752] A diabody is a small antibody fragment prepared by constructing a sFv fragment with a short linker (about 5-10 residues) between the VH and VL domains such that inter-chain but not intra-chain pairing of the V domains is achieved, resulting in a bivalent fragment. Bispecific diabodies are heterodimers of two crossover sFv fragments in which the VH and VL domains of the two antibodies are present on different polypeptide chains. (See, e.g., Hollinger et al., Proc. Natl. Acad. Sci. USA, 90:6444-6448 (1993)).

[0753] Domain antibodies (dAbs), which can be produced in fully human form, are the smallest known antigen-binding fragments of antibodies, ranging from about 11 kDa to about 15 kDa. DAbs are the robust variable regions of the heavy and light chains of immunoglobulins (VH and VL, respectively). They are highly expressed in microbial cell culture, show favorable biophysical properties including, for example, but not limited to, solubility and temperature stability, and are well suited to selection and affinity maturation by in vitro selection systems such as, for example, phage display. DAbs are bioactive as monomers and, owing to their small size and inherent stability can be formatted into larger molecules to create drugs with prolonged serum half-lives or other pharmacological activities.

[0754] Fv and sFv are the only species with intact combining sites that are devoid of constant regions. Thus, they are suitable for reduced nonspecific binding during in vivo use. sFv fusion proteins can be constructed to yield fusion of an effector protein at either the amino or the carboxy terminus of an sFv. The antibody fragment also can be a “linear antibody. Such linear antibody fragments can be monospecific or bispecific.

### Multispecific Antibodies and Antigen-Binding Fragments

[0755] In some embodiments, an antibody provided herein is a multispecific antibody, e.g., a bispecific antibody. Multispecific antibodies are monoclonal antibodies that have binding specificities for at least two different sites. In some embodiments, one of the binding specificities is for cancer associated antigen and the other is for any other antigen. In some embodiments, bispecific antibodies may bind to two different epitopes of antigen. Bispecific antibodies may also be used to localize cytotoxic agents to cancer cells. Bispecific antibodies can be prepared as full length antibodies or antibody fragments.

[0756] In some embodiments, it may be desirable to generate multispecific (e.g. bispecific) monoclonal antibody including monoclonal, human, humanized, or variant antibodies having binding specificities for at least two different epitopes. In some embodiments, the antibodies disclosed herein are multispecific. Exemplary bispecific antibodies may bind to two different epitopes of an antigen (e.g., cancer associated antigen). Alternatively, an antigen-binding region may be combined with a region which binds to a triggering molecule on a leukocyte such as a T-cell receptor molecule (e.g., CD2 or CD3), or Fe receptors for IgG (FcγR), such as FcγRI (CD64), FcγRII (CD32) and FcγRIII (CD16) so as to focus cellular defense mechanisms to the antigen-expressing cell. Bispecific antibodies may also be used to localize cytotoxic agents to cells which express desired antigen. These antibodies possess an antigen-binding arm and an arm which binds the cytotoxic agent (e.g., saporin, anti-interferon-60, vinca alkaloid, ricin A chain, methotrexate or radioactive isotope hapten). Bispecific antibodies can be prepared as full length antibodies or antibody fragments (e.g., F(ab′)2 bispecific antibodies).

[0757] According to another approach for making bispecific antibodies, the interface between a pair of antibody molecules can be engineered to maximize the percentage of heterodimers which are recovered from recombinant cell culture. The preferred interface comprises at least a part of the CH3 domain of an antibody constant domain. In this method, one or more small amino acid side chains from the interface of the first antibody molecule are replaced with larger side chains (e.g., tyrosine or tryptophan). Compensatory “cavities” of identical or similar size to the large side chain(s) are created on the interface of the second antibody molecule by replacing large amino acid side chains with smaller ones (e.g., alanine or threonine). This provides a mechanism for increasing the yield of the heterodimer over other unwanted end-products such as homodimers.

[0758] Bispecific antibodies include cross-linked or “heteroconjugate” antibodies. For example, one of the antibodies in the heteroconjugate can be coupled to avidin, the other to biotin. Heteroconjugate antibodies may be made using any convenient cross-linking methods. Suitable cross-linking agents are contemplated, along with a number of cross-linking techniques.

[0759] Techniques for generating bispecific antibodies from antibody fragments have also been described in the literature. For example, bispecific antibodies can be prepared using chemical linkage. Brennan et al., Science 229: 81 (1985) describe a procedure wherein intact antibodies are proteolytically cleaved to generate F(ab′)2 fragments. These fragments are reduced in the presence of the dithiol complexing agent sodium arsenite to stabilize vicinal dithiols and prevent intermolecular disulfide formation. The Fab′ fragments generated are then converted to thionitrobenzoate (TNB) derivatives. One of the Fab′-TNB derivatives is then reconverted to the Fab′-thiol by reduction with mercaptoethylamine and is mixed with an equimolar amount of the other Fab′-TNB derivative to form the bispecific antibody. The bispecific antibodies produced can be used as agents for the selective immobilization of enzymes. In yet a further embodiment, Fab′-SH fragments directly recovered from E. coli can be chemically coupled in vitro to form bispecific antibodies. (Shalaby et al., J. Exp. Med. 175:217-225 (1992))

[0760] Exemplary techniques for making multispecific antibodies include recombinant co-expression of two immunoglobulin heavy chain-light chain pairs having different specificities, engineering electrostatic steering effects for making antibody Fc-heterodimeric molecules, cross-linking two or more antibodies or fragments, using leucine zippers to produce bi-specific antibodies, using “diabody” technology for making bispecific antibody fragments, using single-chain Fv (sFv) dimers, preparing trispecific antibodies, and “knob-in-hole” engineering (See, e.g., Milstein and Cuello, Nature 305: 537 (1983); Traunecker et al., EMBO J., 10: 3655 (1991); U.S. Pat. Nos. 4,676,980 and 5,731,168; Brennan et al., Science, 229: 81 (1985); Kostelny et al., J. Immunol., 148(5):1547-1553 (1992); Hollinger et al., Proc. Natl. Acad. Sci. USA, 90:6444-6448 (1993); Gruber et al., J. Immunol., 152:5368 (1994)); and Tutt et al. J. Immunol. 147: 60 (1991)). Engineered antibodies with three or more functional antigen-binding sites are also contemplated.

### Variants and Modifications

[0761] In another aspect, provided herein are variants of antibodies or antigen-binding fragments thereof.

### Substitution, Insertion, and Deletion Variants

[0762] In some embodiments, amino acid sequence variants of the antibodies provided herein are contemplated. A variant typically differs from a polypeptide specifically disclosed herein in one or more substitutions, deletions, additions and/or insertions. Such variants can be naturally-occurring or can be synthetically generated, for example, by modifying one or more of the above polypeptide sequences of the invention and evaluating one or more biological activities of the polypeptide as described herein and/or using any of a number of techniques well known in the art. For example, it may be desirable to improve the binding affinity and/or other biological properties of the antibody amino acid sequence variants of an antibody may be prepared by introducing appropriate modifications into the nucleotide sequence encoding the antibody, or by peptide synthesis. Such modifications include, for example, deletions from, and/or insertions into and/or substitutions of residues within the amino acid sequences of the antibody. Any combination of deletion, insertion, and substitution can be made to arrive at the final construct, provided that the final construct possesses the desired characteristics, e.g., antigen-binding.

[0763] In some embodiments, antibody variants or antigen-binding fragment thereof having one or more amino acid substitutions are provided. Sites of interest for mutagenesis by substitution include the CDRs and FRs. Amino acid substitutions may be introduced into an antibody of interest and the products screened for a desired activity, e.g., retained/improved antigen binding, decreased immunogenicity, or improved ADCC or CDC function.

| Original Residue | Exemplary Conserved Substitutions |
|---|---|
| Ala (A) | Val; Leu; Ile |
| Arg (R) | Lys; Gln; Asn |
| Asn (N) | Gln; His; Asp, Lys; Arg |
| Asp (D) | Glu; Asn |
| Cys (C) | Ser; Ala |
| Gln (Q) | Asn; Glu |
| Glu (E) | Asp; Gln |
| Gly (G) | Ala |
| His (H) | Asn; Gln; Lys; Arg |
| Ile (I) | Leu; Val; Met; Ala; Phe; Norleucine |
| Leu (L) | Norleucine; Ile; Val; Met; Ala; Phe |
| Lys (K) | Arg; Gln; Asn |
| Met (M) | Leu; Phe; Ile |
| Phe (F) | Trp; Leu; Val; Ile; Ala; Tyr |
| Pro (P) | Ala |
| Ser (S) | Thr |
| Thr (T) | Val; Ser |
| Trp (W) | Tyr; Phe |
| Tyr (Y) | Trp; Phe; Thr; Ser |
| Val (V) | Ile; Leu; Met; Phe; Ala; Norleucine |

[0764] Hydrophobic amino acids include: Norleucine, Met, Ala, Val, Leu, and Ile. Neutral hydrophilic amino acids include: Cys, Ser, Thr, Asn, and Gln. Acidic amino acids include: Asp and Glu. Basic amino acids include: His, Lys, and Arg. Amino acids with residues that influence chain orientation include: Gly and Pro. Aromatic amino acids include: Trp, Tyr, and Phe.

[0765] In some embodiments, substitutions, insertions, or deletions may occur within one or more CDRs, wherein the substitutions, insertions, or deletions do not substantially reduce antibody binding to antigen. For example, conservative substitutions that do not substantially reduce binding affinity may be made in CDRs. Such alterations may be outside of CDR “hotspots” or SDRs. In some embodiments of the variant VH and VL sequences, each CDR either is unaltered, or contains no more than one, two or three amino acid substitutions.

[0766] Alterations (e.g., substitutions) may be made in CDRs, e.g., to improve antibody affinity. Such alterations may be made in CDR encoding codons with a high mutation rate during somatic maturation (See, e.g., Chowdhury, Methods Mol. Biol. 207:179-196 (2008)), and the resulting variant can be tested for binding affinity. Affinity maturation (e.g., using error-prone PCR, chain shuffling, randomization of CDRs, or oligonucleotide-directed mutagenesis) can be used to improve antibody affinity (See, e.g., Hoogenboom et al. in Methods in Molecular Biology 178:1-37 (2001)). CDR residues involved in antigen-binding may be specifically identified, e.g., using alanine scanning mutagenesis or modeling (See, e.g., Cunningham and Wells, Science, 244:1081-1085 (1989)). CDR-H3 and CDR-L3 in particular are often targeted. Alternatively, or additionally, a crystal structure of an antigen-antibody complex to identify contact points between the antibody and antigen. Such contact residues and neighboring residues may be targeted or eliminated as candidates for substitution. Variants may be screened to determine whether they contain the desired properties.

[0767] Amino acid sequence insertions and deletions include amino- and/or carboxyl-terminal fusions ranging in length from one residue to polypeptides containing a hundred or more residues, as well as intrasequence insertions and deletions of single or multiple amino acid residues. Examples of terminal insertions include an antibody with an N-terminal methionyl residue. Other insertional variants of the antibody molecule include the fusion to a polypeptide which increases serum half-life of the antibody, for example, at the N-terminus or C-terminus. The term “epitope tagged” refers to the antibody fused to an epitope tag. The epitope tag polypeptide has enough residues to provide an epitope against which an antibody there against can be made, yet is short enough such that it does not interfere with activity of the antibody. The epitope tag preferably is sufficiently unique so that the antibody there against does not substantially cross-react with other epitopes. Suitable tag polypeptides generally have at least 6 amino acid residues and usually between about 8-50 amino acid residues (preferably between about 9-30 residues). Examples include the flu HA tag polypeptide and its antibody 12CA5 [Field et al., Mal. Cell. Biol. 8: 2159-2165 (1988)]; the c-myc tag and the 8F9, 3C7, 6E10, G4, B7 and 9E10 antibodies thereto [Evan et al., Mal. Cell. Biol. 5(12): 3610-3616 (1985)]; and the Herpes Simplex virus glycoprotein D (gD) tag and its antibody [Paborsky et al., Protein Engineering 3(6): 547-553 (1990)]. Other exemplary tags are a poly-histidine sequence, generally around six histidine residues, that permits isolation of a compound so labeled using nickel chelation. Other labels and tags, such as the FLAG® tag (Eastman Kodak, Rochester, N.Y.), well known and routinely used in the art, are embraced by the invention.

[0768] Other insertional variants of the antibody molecule include the fusion to the N- or C-terminus of the antibody to an enzyme (e.g., for ADEPT) or a polypeptide which increases the serum half-life of the antibody. Examples of intrasequence insertion variants of the antibody molecules include an insertion of 3 amino acids in the light chain. Examples of terminal deletions include an antibody with a deletion of 7 or less amino acids at an end of the light chain.

### Glycosylation Variants

[0769] In some embodiments, the antibodies are altered to increase or decrease their glycosylation (e.g., by altering the amino acid sequence such that one or more glycosylation sites are created or removed). A carbohydrate attached to an Fc region of an antibody may be altered. Native antibodies from mammalian cells typically comprise a branched, biantennary oligosaccharide attached by an N-linkage to Asn297 of the CH2 domain of the Fc region (See, e.g., Wright et al. TIBTECH 15:26-32 (1997)). The oligosaccharide can be various carbohydrates, e.g., mannose, N-acetyl glucosamine (GlcNAc), galactose, sialic acid, fucose attached to a GlcNAc in the stem of the biantennary oligosaccharide structure. Modifications of the oligosaccharide in an antibody can be made, for example, to create antibody variants with certain improved properties. Antibody glycosylation variants can have improved ADCC and/or CDC function.

[0770] In some embodiments, antibody variants are provided having a carbohydrate structure that lacks fucose attached (directly or indirectly) to an Fc region. For example, the amount of fucose in such antibody may be from 1% to 80%, from 1% to 65%, from 5% to 65% or from 20% to 40%. The amount of fucose is determined by calculating the average amount of fucose within the sugar chain at Asn297, relative to the sum of all glycostructures attached to Asn297 (See, e.g., WO 08/077546). Asn297 refers to the asparagine residue located at about position 297 in the Fc region (Eu numbering of Fc region residues); however, Asn297 may also be located about ±3 amino acids upstream or downstream of position 297, i.e., between positions 294 and 300, due to minor sequence variations in antibodies. Such fucosylation variants can have improved ADCC function (See, e.g. Okazaki et al. J. Mol. Biol. 336:1239-1249 (2004); and Yamane-Ohnuki et al. Biotech. Bioeng. 87: 614 (2004)). Cell lines, e.g., knockout cell lines and methods of their use can be used to produce defucosylated antibodies, e.g., Lec13 CHO cells deficient in protein fucosylation and alpha-1,6-fucosyltransferase gene (FUT8) knockout CHO cells (See, e.g., Ripka et al. Arch. Biochem. Biophys. 249:533-545 (1986); Yamane-Ohnuki et al. Biotech. Bioeng. 87: 614 (2004); Kanda, Y. et al., Biotechnol. Bioeng., 94(4):680-688 (2006). Other antibody glycosylation variants are also contemplated.

[0771] In still another embodiment, the glycosylation of an antibody is modified. For example, an aglycosylated antibody can be made (i.e., the antibody lacks glycosylation). Glycosylation can be altered to, for example, increase the affinity of the antibody for antigen. Such carbohydrate modifications can be accomplished by, for example, altering one or more sites of glycosylation within the antibody sequence. For example, one or more amino acid substitutions can be made that result in elimination of one or more variable region framework glycosylation sites to thereby eliminate glycosylation at that site. Such aglycosylation may increase the affinity of the antibody for antigen. Such an approach is described in further detail in U.S. Pat. Nos. 5,714,350 and 6,350,861 by Co et al. Conservative substitutions involve replacing an amino acid with another member of its class. Non-conservative substitutions involve replacing a member of one of these classes with a member of another class.

[0772] Accordingly, the antibodies or antigen-binding fragment thereof of the present disclosure can be produced by a host cell with one or more of exogenous and/or high endogenous glycosyltransferase activities. Genes with glycosyltransferase activity include β(1,4)—N-acetylglucosaminyltransferase III (GnTII), α-mannosidase II (ManII), β(1,4)-galactosyltransferase (GalT), β(1,2)—N-acetylglucosaminyltransferase I (GnTI), and β(1,2)—N-acetylglucosaminyltransferase II (GnTII). The glycotranferases can comprise a fusion comprising a Golgi localization domain (See, e.g., Lifely et al., Glycobiology 318:813-22 (1995); Schachter, Biochem. Cell Biol. 64:163-81 (1986)). In some embodiments, an antibody can be expressed in a host cell comprising a disrupted or deactivated glycosyltransferase gene. Accordingly, in some embodiments, the present disclosure is directed to a host cell comprising (a) an isolated nucleic acid comprising a sequence encoding a polypeptide having a glycosyltransferase activity; and (b) an isolated polynucleotide encoding an antibody or antigen-binding fragment thereof of the present disclosure. In a particular embodiment, the modified antibody produced by the host cell has an IgG constant region or a fragment thereof comprising the Fc region. In another particular embodiment the antibody is a humanized antibody or a fragment thereof comprising an Fc region. An isolated nucleic acid is a nucleic acid molecule that has been separated from a component of its natural environment. An isolated nucleic acid includes a nucleic acid molecule contained in cells that ordinarily contain the nucleic acid molecule, but the nucleic acid molecule is present extrachromosomally or at a chromosomal location that is different from its natural chromosomal location.

[0773] Antibodies with altered glycosylation produced by the host cells of the invention can exhibit increased Fc receptor binding affinity (e.g., increased binding to a Fcγ activating receptor, such as the FcγRIIIa receptor) and/or increased effector function. The increased effector function can be an increase in one or more of the following: increased antibody-dependent cellular cytotoxicity, increased antibody-dependent cellular phagocytosis (ADCP), increased cytokine secretion, increased immune-complex-mediated antigen uptake by antigen-presenting cells, increased Fc-mediated cellular cytotoxicity, increased binding to NK cells, increased binding to macrophages, increased binding to polymorphonuclear cells (PMNs), increased binding to monocytes, increased crosslinking of target-bound antibodies, increased direct signaling inducing apoptosis, increased dendritic cell maturation, and increased T cell priming. Accordingly, in one aspect, the present invention provides glycoforms of an antibody having increased effector function as compared to the antibody that has not been glycoengineered. (See, e.g., Tang et al., J. Immunol. 179: 2815-2823 (2007)).

[0774] The present disclosure is also directed to a method for producing an antibody or antigen-binding fragment thereof, described herein having modified oligosaccharides, comprising (a) culturing a host cell engineered to express at least one nucleic acid encoding a polypeptide having glycosyltransferase activity under conditions which permit the production of an antibody according to the present disclosure, wherein said polypeptide having glycosyltransferase activity is expressed in an amount sufficient to modify the oligosaccharides in the Fc region of said antibody produced by said host cell; and (b) isolating said antibody. In another embodiment, there are two polypeptides having glycosyltransferase activity. The antibodies or antigen-binding fragment thereof produced by the methods of the present invention can have increased Fc receptor binding affinity and/or increased effector function. In some embodiments, the percentage of bisected N-linked oligosaccharides in the Fc region of the antibody is at least about 10% to about 100%, specifically at least about 50%, more specifically, at least about 60%, at least about 70%, at least about 80%, or at least about 90-95% of the total oligosaccharides. In yet another embodiment, the antibody produced by the methods of the invention has an increased proportion of nonfucosylated oligosaccharides in the Fc region as a result of the modification of its oligosaccharides by the methods of the present invention. In some embodiments, the percentage of nonfucosylated oligosaccharides is at least about 20% to about 100%, specifically at least about 50%, at least about 60% to about 70%, and more specifically, at least about 75%. The nonfucosylated oligosaccharides may be of the hybrid or complex type. In yet another embodiment, the antibody or antigen-binding fragment thereof produced by the methods of the invention has an increased proportion of bisected oligosaccharides in the Fc region as a result of the modification of its oligosaccharides by the methods of the present invention. In some embodiments, the percentage of bisected oligosaccharides is at least about 20% to about 100%, specifically at least about 50%, at least about 60% to about 70%, and more specifically, at least about 75%.

[0775] In another embodiment, the present invention is directed to an antibody or antigen-binding fragment thereof engineered to have increased effector function and/or increased Fc receptor binding affinity, produced by the methods of the disclosure. In some embodiments, the antibody is an intact antibody. In some embodiments, the antibody is an antibody fragment containing the Fc region, or a fusion protein that includes a region equivalent to the Fc region of an immunoglobulin.

[0776] In one aspect, the present disclosure provides host cell expression systems for the generation of the antibodies or antigen-binding fragment thereof of the present disclosure having modified glycosylation patterns. In particular, the present disclosure provides host cell systems for the generation of glycoforms of the antibodies or antigen-binding fragment thereof, disclosed herein, having an improved therapeutic value. Therefore, the present disclosure provides host cell expression systems selected or engineered to express a polypeptide having a glycosyltransferase activity. Generally, any type of cultured cell line, including the cell lines discussed above, can be used as a background to engineer the host cell lines of the present invention. In some embodiments, CHO cells, BHK cells, NS0 cells, SP2/0 cells, YO myeloma cells, P3X63 mouse myeloma cells, PER cells, PER.C6 cells or hybridoma cells, other mammalian cells, yeast cells, insect cells, or plant cells are used as the background cell line to generate the engineered host cells of the invention. The host cells which contain the coding sequence of an antibody or antigen-binding fragment thereof of the invention and which express the biologically active gene products may be identified by at least four general approaches; (a) DNA-DNA or DNA-RNA hybridization; (b) the presence or absence of “marker” gene functions; (c) assessing the level of transcription as measured by the expression of the respective mRNA transcripts in the host cell; and (d) detection of the gene product as measured by immunoassay or by its biological activity.

### Cysteine Engineered Antibody Variants

[0777] In some embodiments, it may be desirable to create cysteine engineered antibodies or antigen-binding fragment thereof, e.g., “thioMAbs,” in which one or more residues of an antibody are substituted with cysteine residues. In some embodiments, the substituted residues occur at accessible sites of the antibody. Reactive thiol groups can be positioned at sites for conjugation to other moieties, such as drug moieties or linker-drug moieties, to create an immunoconjugate. In some embodiments, any one or more of the following residues may be substituted with cysteine: V205 (Kabat numbering) of the light chain; A118 (EU numbering) of the heavy chain; and S400 (EU numbering) of the heavy chain Fc region. Cysteine engineered antibodies may be generated as described. Any cysteine residue not involved in maintaining the proper conformation of the monoclonal, human, humanized, or variant antibody also may be substituted, generally with serine, to improve the oxidative stability of the molecule and prevent aberrant crosslinking. Conversely, cysteine bond(s) may be added to the antibody to improve its stability (particularly where the antibody is an antibody fragment such as an Fv fragment).

### Antibody Derivatives

[0778] In some embodiments, an antibody or antigen-binding fragment thereof provided herein may be further modified to contain additional nonproteinaceous moieties that are known in the art and readily available. The moieties suitable for derivatization of the antibody include but are not limited to water soluble polymers. Non-limiting examples of water soluble polymers include, but are not limited to, polyethylene glycol (PEG), copolymers of ethylene glycol/propylene glycol, carboxymethylcellulose, dextran, polyvinyl alcohol, polyvinyl pyrrolidone, poly-1,3-dioxolane, poly-1,3,6-trioxane, ethylene/maleic anhydride copolymer, polyaminoacids (either homopolymers or random copolymers), and dextran or poly(n-vinyl pyrrolidone)polyethylene glycol, polypropylene glycol homopolymers, polypropylene oxide/ethylene oxide co-polymers, polyoxyethylated polyols (e.g., glycerol), polyvinyl alcohol, and mixtures thereof. Polyethylene glycol propionaldehyde may have advantages in manufacturing due to its stability in water. The polymer may be of any molecular weight, and may be branched or unbranched. The number of polymers attached to the antibody may vary, and if two or more polymers are attached, they can be the same or different molecules.

[0779] In another embodiment, conjugates of an antibody and nonproteinaceous moiety that may be selectively heated by exposure to radiation are provided. In some embodiments, the nonproteinaceous moiety is a carbon nanotube (See, e.g., Kam et al., Proc. Natl. Acad. Sci. USA 102: 11600-11605 (2005)). The radiation may be of any wavelength, and includes, but is not limited to, wavelengths that do not harm ordinary cells, but which heat the nonproteinaceous moiety to a temperature at which cells proximal to the antibody-nonproteinaceous moiety are killed.

### Fc Region Variants

[0780] Mutation of residues within Fc receptor binding sites can result in altered effector function, such as altered ADCC, CDC activity, and/or altered half-life. Mutations include, for example, insertion, deletion, and/or substitution of one or more residues as described in more detail above, including substitution with alanine, a conservative substitution, a non-conservative substitution, and/or replacement with a corresponding amino acid residue at the same position from a different IgG subclass (e.g., replacing an IgG1 residue with a corresponding IgG2 residue at that position). An Fc region herein is a C-terminal region of an immunoglobulin heavy chain that contains at least a portion of the constant region. An Fc region includes native sequence Fc regions and variant Fc regions. The Fc region variant may comprise a human Fc region sequence (e.g., a human IgG1, IgG2, IgG3 or IgG4 Fc region) comprising an amino acid modification (e.g., a substitution) at one or more amino acid positions.

[0781] Previous studies mapped the binding site on human and murine IgG for FcγR primarily to the lower hinge region composed of IgG residues 233-239. Other studies proposed additional broad segments, e.g., Gly316-Lys338 for human Fc gamma receptor I, Lys274-Arg301 and Tyr407Arg416 for human Fc gamma receptor III, or found a few specific residues outside the lower hinge, e.g., Asn297 and Glu318 for murine IgG2b interacting with murine Fc gamma receptor II. The report of the 3.2-A crystal structure of the human IgG Fc fragment with human Fc gamma receptor IIIA delineated IgG1 residues Leu234-Ser239, Asp265-Glu269, Asn297-Thr299, and Ala327-Ile332 as involved in binding to Fc receptor γIIIA. It has been suggested based on crystal structure that in addition to the lower hinge (Leu234-Gly237), residues in IgG CH2 domain loops FG (residues 326-330) and BC (residues 265-271) might play a role in binding to Fc gamma receptor IIA. See Shields et al., J. Biol. Chem., 276(9):6591-6604 (2001). Shields et al. reported that IgG1 residues involved in binding to all human Fc receptors are located in the CH2 domain proximal to the hinge and fall into two categories as follows: 1) positions that may interact directly with all FcR include Leu234-Pro238, Ala327, and Pro329 (and possibly Asp265); 2) positions that influence carbohydrate nature or position include Asp265 and Asn297.

[0782] In some embodiments, the invention contemplates an antibody variant that possesses some but not all effector functions, which make it a desirable candidate for applications in which the half-life of the antibody in vivo is important yet certain effector functions (such as complement and ADCC) are unnecessary or deleterious. In vitro and/or in vivo cytotoxicity assays can be conducted to confirm the effect of one or more Fc amino acid modifications on CDC and/or ADCC activities. For example, Fc receptor (FcR) binding assays can be conducted to ensure that the antibody lacks FcγR binding (hence likely lacking ADCC activity), but retains FcRn binding ability.

Fc Variants with Altered Binding to an Fc Gamma Receptor

[0783] In some instances, exhibits altered affinity for one or more Fc gamma receptors (FcγR). For example, an Fc variant exhibits increased affinity for one or more Fc gamma receptors (FcγR), decreased affinity for one or more Fc gamma receptors (FcγR), or a combination thereof. In one instance, an Fc variant exhibits increased ADCC activity. In yet another example, the Fc region is modified to increase the ability of the antibody to mediate antibody dependent cellular cytotoxicity (ADCC). The binding sites on human IgG1 for Fc gamma RI (FcγRI), Fc gamma RH (FcγRII), Fc gamma RIII (FcγRIIII), and FcRn have been mapped and variants with altered binding have been described. Non-limiting examples of such modifications are described in, for example, U.S. Pat. No. 6,737,056; PCT Publication WO 00/42072 by Presta; Shields, R. L. et al. (2001) J. Biol. Chem. 276:6591-6604; U.S. Pat. No. 7,332,581, etc. In some embodiments, the constant region of the antibodies disclosed herein is replaced with an IGHG1.

[0784] In some embodiments, an Fc variant provided herein that exhibits improved ADCC activity comprises an Fc region with a mutation at amino acid position 298, 333, and/or 334 of the Fc region (using Kabat numbering). In one instance, provided herein is an Fc variant with altered effector and/or Fc-gamma-receptor binding that contain at least one mutation in a human IgG Fc region at amino acid position 238, 239, 248, 249, 252, 254, 255, 256, 258, 265, 267, 268, 269, 270, 272, 276, 278, 280, 283, 285, 286, 289, 290, 292, 294, 295, 296, 298, 301, 303, 305, 307, 309, 312, 315, 320, 322, 324, 326, 327, 329, 330, 331, 333, 334, 335, 337, 338, 340, 360, 373, 376, 378, 382, 388, 389, 398, 414, 416, 419, 430, 434, 435, 437, 438, and/or 439 (using Kabat numbering), which variant displays a receptor binding profile associated with altered ADCC or CDC activity. In one instance, provided herein is an Fc variant that displays reduced binding to a FcγRI, which comprises an amino acid modification at amino acid position 238, 265, 269, 270, 327, and/or 329 (utilizing Kabat numbering). In one instance, provided herein is an Fc variant that displays reduced binding to a FcγRII, that contains an amino acid modification at amino acid position 238, 265, 269, 270, 292, 294, 295, 298, 303, 324, 327, 329, 333, 335, 338, 373, 376, 414, 416, 419, 435, 438, and/or 439 (utilizing Kabat numbering). In one instance, provided herein is an Fc variant that displays increased binding to FcγRII that contains an amino acid modification at amino acid position 255, 256, 258, 267, 268, 272, 276, 280, 283, 285, 286, 290, 301, 305, 307, 309, 312, 315, 320, 322, 326, 330, 331, 337, 340, 378, 398, and/or 430 (utilizing Kabat numbering).

[0785] In one instance, provided herein is an Fc variant that exhibits altered binding to a FcγRII that contains an amino acid modification at amino acid position Arg255, Thr256, Glu258, His268, Ser267, Asp270, Asn276, Glu272, Asp280, His285, Asn286, Lys290, Arg292, Gln295, Ser298, Arg301, Thr307, Leu309, Asn315, Lys322, Lys326, Pro331, Ser337, Ala339, Ala378, and/or Lys414 (utilizing Kabat numbering). In one instance, provided herein is an Fc variant that exhibits reduced binding to a FcγRII that contains an amino acid modification at amino acid position A327Q, A327S, P329A, D265A, and/or D270A (utilizing Kabat numbering). In one instance, provided herein is an Fc variant that displays reduced binding to a FcγRIII, that contains an amino acid modification at amino acid position 238, 239, 248, 249, 252, 254, 265, 268, 269, 270, 272, 278, 289, 293, 294, 295, 296, 301, 303, 322, 327, 329, 338, 340, 373, 376, 382, 388, 389, 416, 434, 435, and/or 437 (utilizing Kabat numbering). In one instance, provided herein is an Fc variant that displays improved binding to FcγRII and FcγRIIIA that contains an amino acid modification at amino acid position T256A and/or K290A (using Kabat numbering).

[0786] In one instance, provided herein is an Fc variant that displays reduced binding to FcγRII and FcγRIIIA that contains an amino acid modification at amino acid position D270A, Q295A, and/or A327S (using Kabat numbering). In one instance, provided herein is an Fc variant that displays improved binding to FcγRII and no effect FcγRIIIA that contains an amino acid modification at amino acid position Kabat numbering). In one instance, provided herein is an Fc variant that displays reduced binding to FcγRII and improved binding to FcγRIIIA that contains an amino acid modification at amino acid position S298A (using Kabat numbering). In one instance, provided herein is an Fc variant that displays improved binding to FcγRII and reduced binding to FcγRIIIA that contains an amino acid modification at amino acid position H268A, R301A, and/or K322A (using Kabat numbering). In one instance, provided herein is an Fc variant that displays reduced binding to FcγRII and no effect on FcγRIIIA that contains an amino acid modification at amino acid position R292A and/or K414A (using Kabat numbering).

[0787] In one instance, provided herein is an Fc variant that displays no effect on FcγRII and reduced binding to FcγRIIIA that contains an amino acid modification at amino acid position S239A, E269A, E293A, V296F, V303A, A327G, K338A, and/or D376A (using Kabat numbering). In one instance, provided herein is an Fc variant that displays increased binding to FcγRIIIA that contains an amino acid modification at amino acid position E333A, K334A, and/or A339T (using Kabat numbering).

[0788] An Fc variant that displays improved binding to a FcγR may also be made and may comprise an amino acid modification at amino acid position 255, 256, 258, 267, 268, 272, 276, 280, 283, 285, 286, 290, 298, 301, 305, 307, 309, 312, 315, 320, 322, 326, 330, 331, 333, 334, 337, 340, 360, 378, 398, and/or 430 (utilizing Kabat numbering). In one instance, provided herein is an Fc variant that displays improved binding to a FcγRIII, and optionally may further display decreased binding to FcγRII, which variant comprises an amino acid modification at amino acid position 298 and/or 333 of an Fc region (utilizing Kabat numbering). In one instance, provided herein is an Fc variant that displays improved binding to a FcγRII that contains an amino acid modification at amino acid position 255, 256, 258, 267, 268, 272, 276, 280, 283, 285, 286, 290, 301, 305, 307, 309, 312, 315, 320, 322, 326, 330, 331, 337, 340, 378, 398 and/or 430 (utilizing Kabat numbering). Such variant may further display decreased binding to FcγRIII if it includes an Fc region amino acid modification at any one or more of amino acid positions 268, 272, 298, 301, 322 or 340 (utilizing Kabat numbering).

[0789] In one instance, a variant described herein contains a mutation at amino acid positions 240, 243, 245, 247, 262, 263, 266, 299, 313, 325, 328, and/or 332 (using Kabat numbering); or at amino acid positions 234, 235, 239, 240, 241, 243, 244, 245, 247, 262, 263, 264, 265, 266, 267, 269, 296, 297, 298, 299, 313, 325, 327, 328, 329, 330, and/or 332 (using Kabat numbering), of which mutations at positions 234, 235, 239, 240, 241, 243, 244, 245, 247, 262, 263, 264, 265, 266, 267, 269, 296, 297, 298, 299, 313, 325, 327, 328, 329, 330, or 332 may reduce ADCC activity or reduce binding to an Fc gamma receptor. In one instant, an Fc variant described herein contains a mutation at amino acid position 234, 235, 239, 240, 243, 264, 266, 328, 330, 332, and/or 325 (using Kabat numbering) that increases ADCC activity, and wherein the Fc variant comprises at least one substitution selected from the group consisting of 234E, 234Y, 2341, 235D, 235S, 235Y, 2351, 239D, 239E, 239N, 239Q, 239T, 2401, 240M, 243L, 2641, 264T, 264Y, 2661, 328M, 3281, 328Q, 328D, 328V, 328T, 330Y, 330L, 3301, 332D, 332E, 332N, 332Q, and 325T.

[0790] In one instance, provided herein is an Fc variant that exhibits altered binding to a FcγRII that contains an amino acid modification at amino acid position Arg255, Thr256, Glu258, His268, Ser267, Asp270, Asn276, Glu272, Asp280, His285, Asn286, Lys290, Arg292, Gln295, Ser298, Arg301, Thr307, Leu309, Asn315, Lys322, Lys326, Pro331, Ser337, Ala339, Ala378, and/or Lys414 (utilizing Kabat numbering). In one instance, provided herein is an Fc variant that exhibits reduced binding to a FcγRII that contains an amino acid modification at amino acid position A327Q, A327S, P329A, D265A, and/or D270A (utilizing Kabat numbering). In one instance, provided herein is an Fc variant that exhibits reduced binding to a FcγRIIIA that contains an amino acid modification at amino acid position Ser239, Ser267 (Gly only), His268, Glu293, Gln295, Tyr296, Arg301, Val303, Lys338, and/or Asp376 (utilizing Kabat numbering). In one instance, provided herein is an Fc variant that exhibits reduced binding to a FcγRIIA and FcγRIIB that contains an amino acid modification at amino acid position Lys414 (utilizing Kabat numbering). In one instance, provided herein is an Fc variant that exhibits reduced binding to a FcγRIIA and FcγRIIIA that contains an amino acid modification at amino acid position Arg416 (utilizing Kabat numbering). In one instance, provided herein is an Fc variant that exhibits reduced binding to a FcγRIIA and FcγRIIB that contains an amino acid modification at amino acid position Gln419 (utilizing Kabat numbering).

[0791] In one instance, provided herein is an Fc variant that exhibits improved (increased) binding to a FcγRIIIA that contains an amino acid modification at amino acid position Lys360 (utilizing Kabat numbering). Armour et al. (Mol Immunol. 2003; 40(9):585-93) identified IgG1 variants which react with the activating receptor, FcγRIIa, at least 10-fold less efficiently than wildtype IgG1, but whose binding to the inhibitory receptor, FcγRIIb, is only four-fold reduced. Mutations were made in the region of amino acids 233-236 and/or at amino acid positions 327, 330 and 331. See also WO 99/58572. Non-limiting examples of in vitro assays to assess ADCC activity of a molecule of interest are described, for example, in U.S. Pat. Nos. 5,500,362 and 5,821,337. Alternatively, non-radioactive assays methods may be employed (e.g., ACTI™ and CYTOTOX 96® non-radioactive cytotoxicity assays). Useful effector cells for such assays include peripheral blood mononuclear cells (PBMC) and Natural Killer (NK) cells. Alternatively, or additionally, ADCC activity of the molecule of interest may be assessed in vivo, e.g., in an animal model (See, e.g., Clynes et al., Proc. Nat'l Acad. Sci. USA 95:652-656 (1998)).

Fc Variants with Decreased C1q Binding

[0792] In another instance, an Fc variant exhibits reduced C1q binding. C1q binding assays may also be carried out to confirm that the antibody is able or unable bind C1q and, hence, contains or lacks CDC activity (Idusogie et al., J. Immunol. 164: 4178-4184 (2000)). To assess complement activation, a CDC assay may be performed (See, e.g., Gazzano-Santoro et al., J. Immunol. Methods 202:163 (1996); Cragg, M. S. et al., Blood 101:1045-1052 (2003); and Cragg et al., Blood 103:2738-2743 (2004)).

[0793] In another example, one or more amino acids can be replaced with a different amino acid residue such that the antibody has altered C1q binding and/or reduced or abolished complement dependent cytotoxicity (CDC). This approach is described in further detail in U.S. Pat. No. 6,194,551 by Idusogie et al. In another example, one or more amino acid residues are altered to thereby alter the ability of the antibody to fix complement. This approach is described further in PCT Publication WO 94/2935 1 by Bodmer et al. In one instance, an Fc variant provided herein can contain a mutation at amino acid position 329, 331, and/or 322 (using Kabat numbering), and exhibits reduced C1q binding and/or CDC activity. In some instances, C1q binding activity and/or CDC activity of an antibody can be reduced by mutating amino acid residue 318, 320, and/or 322 (using Kabat numbering) of a heavy chain; replacing residue 297 (Asn) may result in removal of lytic activity of an antibody. Cytophilic activity of IgG1 is a property of its heavy chain CH2 domain. In one instance, where an Fc variant is an IgG, amino acid residues 234-237 are maintained as wild type to preserve cytophilic activity of the molecule. An IgG2 antibody containing the entire ELLGGP sequence (residues 233-238) may, in some instances, be more active than wild-type IgG1. In some instances, C1q binding activity and/or lytic activity of an IgG1 antibody can be reduced by mutating amino acid residue Pro331 to Ser. In other instances, C1q binding activity and/or lytic activity of an IgG4 antibody can be reduced by mutating amino acid residue Pro for Ser331 (Xu et al., J Biol Chem. 1994; 269(5):3469-74).

Fc Variants with Interchain Disulfide Binds or Dual Fc Regions

[0794] In yet another embodiment, it may be desirable to modify the antibody of the invention with respect to effector function, so as to enhance the effectiveness of the antibody in treating cancer, for example. For example, one or more cysteine residue(s) may be introduced in the Fc region, thereby allowing interchain disulfide bond formation in this region. The homodimeric antibody thus generated may have improved internalization capability, increased complement-mediated cell killing, and/or antibody-dependent cellular cytotoxicity (ADCC). See Caron et al., J. Exp Med. 176: 1191-1195 (1992) and Shapes, B. J. Immunol. 148: 2918-2922 (1992). Homodimeric antibodies with enhanced anti-tumor activity may also be prepared using heterobifunctional cross-linkers as described in Wolff et al., Cancer Research 53: 2560-2565 (1993). Alternatively, an antibody can be engineered which has dual Fc regions and may thereby have enhanced complement lysis and/or ADCC capabilities. See, Stevenson et al., Anti-Cancer Drug Design 3: 219-230 (1989).

Fc Variants with Increased FcRn Binding and In Vivo Half-Life

[0795] Fc region variants with altered binding affinity for the neonatal receptor (FcRn) are also contemplated herein. Fc region variants with improved affinity for FcRn are anticipated to have longer serum half-lives, and such variants are useful in methods of treating subjects where long half-life of the administered polypeptide is desired, e.g., to treat a chronic disease or disorder. Fc region variants with decreased FcRn binding affinity, on the contrary, are expected to have shorter half-lives, and such variants may be administered to a subject where a shortened circulation time may be preferred, e.g. for in vivo diagnostic imaging or for antibodies which have toxic side effects when left circulating in the blood stream for extended periods, etc.

[0796] Fc region variants with altered binding affinity for FcRn include those that contains an amino acid modification at amino acid position 238, 252, 253, 254, 255, 256, 265, 272, 286, 288, 303, 305, 307, 309, 311, 312, 317, 340, 356, 360, 362, 376, 378, 380, 382, 386, 388, 400, 413, 415, 424, 433, 434, 435, 436, 439, and/or 447 (utilizing Kabat numbering). Fc region variants with decreased FcRn binding affinity are less likely to cross the placenta and, therefore, may be utilized in the treatment of diseases or disorders in pregnant women. In one instance, provided herein is an Fc variant that exhibits reduced binding to FcRn that contains an amino acid modification at amino acid position 252, 253, 254, 255, 288, 309, 386, 388, 400, 415, 433, 435, 436, 439, and/or 447 (utilizing Kabat numbering).

[0797] In one instance, provided herein is an Fc variant that exhibits increased binding to a FcRn that contains an amino acid modification at amino acid position 238, 256, 265, 272, 286, 303, 305, 307, 311, 312, 317, 340, 356, 360, 362, 376, 378, 380, 382, 413, 424, and/or 434 (utilizing Kabat numbering). In one instance, provided herein is an Fc variant that exhibits increased binding to a FcRn that contains an amino acid of Pro238Ala, Thr256Ala, Thr307Ala, Gln311Ala, Asp312Ala, Glu380Ala, Glu382Ala, and/or Asn434Ala (utilizing Kabat numbering). In one instance, provided herein is an Fc variant that exhibits reduced binding to a FcRn that contains a modification at amino acid position Glu233-Gly236, Arg255, Lys288, Ser415, and/or His433 (utilizing Kabat numbering). In one instance, provided herein is an Fc variant that exhibits abrogated binding to a FcRn that contains a modification at amino acid position Ile253, Ser254, His435, and/or Tyr436 (utilizing Kabat numbering). Schuurman et al., Mol Immunol. 2001; 38(1):1-8, incorporated by reference herein in its entirety, report that mutating one of the hinge cysteines involved in the inter-heavy chain bond formation, Cys226, to serine resulted in a more stable inter-heavy chain linkage. Mutating the IgG4 hinge sequence Cys-Pro-Ser-Cys to the IgG1 hinge sequence Cys-Pro-Pro-Cys also markedly stabilizes the covalent interaction between the heavy chains. Angal et al., Mol Immunol. 1993; 30(1):105-8, incorporated by reference herein in its entirety, report that mutating the serine at amino acid position 241 in IgG4 to praline (found at that position in IgG1 and IgG2) led to the production of a homogeneous antibody, as well as extending serum half-life and improving tissue distribution compared to the original chimeric IgG4. Other such examples of Fc region variants are also contemplated (See, e.g., Duncan & Winter, Nature 322:738-40 (1988); Chan C A and Carter P J (2010) Nature Rev Immunol 10:301-316); and Shields et al., J. Biol. Chem. 9(2): 6591-6604 (2001). Determination of FcRn binding and in vivo clearance/half-life can be performed using methods known in the art (See, e.g., Petkova, S. B. et al., Int'l. Immunol. 18(12):1759-1769 (2006)).

### Variants of Antibody Fragments and Salvage Receptor Binding Epitopes

[0798] In certain embodiments of the invention, it may be desirable to use an antibody fragment, rather than an intact antibody, to increase tumor penetration, for example. In this case, it may be desirable to modify the antibody fragment in order to increase its serum half-life, for example, adding molecules such as PEG or other water soluble polymers, including polysaccharide polymers, to antibody fragments to increase the half-life. This may also be achieved, for example, by incorporation of a salvage receptor binding epitope into the antibody fragment (e.g., by mutation of the appropriate region in the antibody fragment or by incorporating the epitope into a peptide tag that is then fused to the antibody fragment at either end or in the middle, e.g., by DNA or peptide synthesis) (see, e.g., WO 96/32478). The salvage receptor binding epitope preferably constitutes a region wherein any one or more amino acid residues from one or two loops of an Fc domain are transferred to an analogous position of the antibody fragment. Even more preferably, three or more residues from one or two loops of the Fc domain are transferred. Still more preferred, the epitope is taken from the CH2 domain of the Fc region (e.g., of an IgG) and transferred to the CHI, CH3, or VH region, or more than one such region, of the antibody. Alternatively, the epitope is taken from the CH2 domain of the Fc region and transferred to the CL region or VL region, or both, of the antibody fragment. See, also, International applications WO 97/34631 and WO 96/32478.

[0799] Thus, antibodies of the invention may comprise a human Fc portion, a human consensus Fc portion, or a variant thereof that retains the ability to interact with the Fc salvage receptor, including variants in which cysteines involved in disulfide bonding are modified or removed, and/or in which the a Met is added at the N-terminus and/or one or more of the N-terminal 20 amino acids are removed, and/or regions that interact with complement, such as the C1q binding site, are removed. Isaacs et al., J Immunol. 1998; 161(8):3862-9, incorporated herein by reference in its entirety, report that mutations within a motif critical for FcγR binding (glutamate 233 to praline, leucine/phenylalanine 234 to valine, and leucine 235 to alanine) completely prevented depletion of target cells. The mutation glutamate 318 to alanine eliminated effector function of mouse IgG2b and also reduced the potency of human IgG4.

### Affinity Maturation

[0800] Affinity maturation involves preparing and screening antibody variants that have substitutions within the CDRs of a parent antibody and selecting variants that have improved biological properties such as binding affinity relative to the parent antibody. A convenient way for generating such substitutional variants is affinity maturation using phage display. Briefly, several hypervariable region sites (e.g. 6-7 sites) are mutated to generate all possible amino substitutions at each site. The antibody variants thus generated are displayed in a monovalent fashion from filamentous phage particles as fusions to the gene III product of M13 packaged within each particle. The phage-displayed variants are then screened for their biological activity (e.g. binding affinity) Alanine scanning mutagenesis can be performed to identify hypervariable region residues that contribute significantly to antigen binding. Alternatively, or in addition, it may be beneficial to analyze a crystal structure of the antigen-antibody complex to identify contact points between the antibody and antigen. Such contact residues and neighboring residues are candidates for substitution according to the techniques elaborated herein. Once such variants are generated, the panel of variants is subjected to screening as described herein and antibodies with superior properties in one or more relevant assays may be selected for further development.

### Altered Glycosylation

[0801] Additionally or alternatively, an antibody can be made that has an altered type of glycosylation, such as a hypofucosylated antibody having reduced amounts of fucosyl residues or an antibody having increased bisecting GlcNac structures. Such altered glycosylation patterns have been demonstrated to increase the ADCC ability of antibodies. Embodiments encompassing glycosylated antibodies or antigen-binding fragments thereof have been described in above sections. Such carbohydrate modifications can be accomplished by, for example, expressing the antibody in a host cell with altered glycosylation machinery. Cells with altered glycosylation machinery have been described in the art and can be used as host cells in which to express recombinant antibodies according to at least some embodiments of the disclosure to thereby produce an antibody with altered glycosylation. For example, the cell lines Ms704, Ms705, and Ms709 lack the fucosyltransferase gene, FUT8 (alpha (1,6) fucosyltransferase), such that antibodies expressed in the Ms704, Ms705, and Ms709 cell lines lack fucose on their carbohydrates. The Ms704, Ms705, and Ms709 FUT8.−/− cell lines are created by the targeted disruption of the FUT8 gene in CHO/DG44 cells using two replacement vectors (see U.S. Patent Publication No. 20040110704 by Yamane et al. and Yamane-Ohnuki et al. (2004) Biotechnol Bioeng 87:614-22). As another example, EP 1,176,195 by Hanai et al. describes a cell line with a functionally disrupted FUT8 gene, which encodes a fucosyl transferase, such that antibodies expressed in such a cell line exhibit hypofucosylation by reducing or eliminating the alpha 1,6 bond-related enzyme. Hanai et al. also describe cell lines which have a low enzyme activity for adding fucose to the N-acetylglucosamine that binds to the Fc region of the antibody or does not have the enzyme activity, for example the rat myeloma cell line YB2/0 (ATCC CRL 1662). PCT Publication WO 03/035835 by Presta describes a variant CHO cell line, Lec13 cells, with reduced ability to attach fucose to Asn(297)-linked carbohydrates, also resulting in hypofucosylation of antibodies expressed in that host cell (see also Shields, R. L. et al. (2002) J. Biol. Chem. 277:26733-26740). PCT Publication WO 99/54342 by Umana et al. describes cell lines engineered to express glycoprotein-modifying glycosyl transferases (e.g., beta(1,4)-N-acetylglucosaminyltransferase III (GnTIII)) such that antibodies expressed in the engineered cell lines exhibit increased bisecting GlcNac structures which results in increased ADCC activity of the antibodies (see also Umana et al. (1999) Nat. Biotech. 17:176-180). Alternatively, the fucose residues of the antibody may be cleaved off using a fucosidase enzyme. For example, the fucosidase alpha-L-fucosidase removes fucosyl residues from antibodies (Tarentino, A. L. et al. (1975) Biochem. 14:5516-23). Pegylation

[0802] Another modification of the antibodies herein that is contemplated by the present disclosure is pegylation. An antibody can be pegylated to, for example, increase the biological (e.g., serum) half-life of the antibody. To pegylate an antibody, the antibody, or fragment thereof, typically is reacted with polyethylene glycol (PEG), such as a reactive ester or aldehyde derivative of PEG, under conditions in which one or more PEG groups become attached to the antibody or antibody fragment. Preferably, the pegylation is carried out via an acylation reaction or an alkylation reaction with a reactive PEG molecule (or an analogous reactive water-soluble polymer). As used herein, the term “polyethylene glycol” is intended to encompass any of the forms of PEG that have been used to derivatize other proteins, such as mono (C1-C10) alkoxy- or aryloxy-polyethylene glycol or polyethylene glycol-maleimide. In certain embodiments, the antibody to be pegylated is an aglycosylated antibody. Methods for pegylating proteins are known in the art and can be applied to the antibodies according to at least some embodiments of the invention. See, for example, EP 0 154 316 by Nishimura et al. and EP 0 401 384 by Ishikawa et al.

### Other Covalent Modifications

[0803] Covalent modifications of the antibody are also included within the scope of this invention. They may be made by chemical synthesis or by enzymatic or chemical cleavage of the antibody, if applicable. Other types of covalent modifications of the antibody are introduced into the molecule by reacting targeted amino acid residues of the antibody with an organic derivatizing agent that is capable of reacting with selected side chains or the N- or C-terminal residues.

[0804] Cysteinyl residues most commonly are reacted with a haloacetate (and corresponding amines), such as chloroacetic acid or chloroacetamide, to give carboxymethyl or carboxyamidomethyl derivatives. Cysteinyl residues also are derivatized by reaction with bromotrifluoroacetone, alpha-bromo-(5 imidozoyl)propionic acid, chloroacetyl phosphate, N-alkylmaleimides, 3-nitro-2-pyridyl disulfide, methyl 2-pyridyl disulfide, p-chloromercuribenzoate, 2-chloromercuri-4-nitrophenol, or chloro-7-nitrobenzo-2-oxa-1,3-diazole.

[0805] Histidyl residues are derivatized by reaction with diethylpyrocarbonate at pH 5.5-7.0 because this agent is relatively specific for the histidyl side chain. Para-bromophenacyl bromide also is useful; the reaction is preferably performed in 0.1 M sodium cacodylate at pH 6.0. Lysinyl and amino-terminal residues are reacted with succinic or other carboxylic acid anhydrides. Derivatization with these agents has the effect of reversing the charge of the lysinyl residues. Other suitable reagents for derivatizing alpha amino-containing residues include imidoesters such as methyl picolinimidate, pyridoxal phosphate, pyridoxal, chloroborohydride, trinitrobenzenesulfonic acid, methylisourea, 2,4-pentanedione, and transaminase-catalyzed reaction with glyoxylate.

[0806] Arginyl residues are modified by reaction with one or several conventional reagents, among them phenylgly-oxal, 2,3-butanedione, 1,2-cyclohexanedione, and ninhydrin. Derivatization of arginine residues requires that the reaction be performed in alkaline conditions because of the high pKa of the guanidine functional group. Furthermore, these reagents may react with the groups of lysine as well as the arginine epsilon-amino group.

[0807] The specific modification of tyrosyl residues may be made, with particular interest in introducing spectral labels into tyrosyl residues by reaction with aromatic diazonium compounds or tetranitromethane. Most commonly, N-acetylimidizole and tetranitromethane are used to form 0-acetyl tyrosyl species and 3-nitro derivatives, respectively. Tyrosyl residues are iodinated using 125I or 131I to prepare labeled proteins for use in radioimmunoassay. Carboxyl side groups (aspartyl or glutamyl) are selectively modified by reaction with carbodiimides (R—N═C═N—R′), where R and R′ are different alkyl groups, such as 1-cyclohexyl-3-(2-morpholinyl-4-ethyl) carbodiimide or 1-ethyl-3-(4-azonia-4,4-dimethylpentyl)carbodiimide. Furthermore, aspartyl and glutamyl residues are converted to asparaginyl and glutaminyl residues by reaction with ammonium ions.

[0808] Glutaminyl and asparaginyl residues are frequently deamidated to the corresponding glutamyl and aspartyl residues, respectively. These residues are deamidated under neutral or basic conditions. The deamidated form of these residues falls within the scope of this invention. Other modifications include hydroxylation of proline and lysine, phosphorylation of hydroxyl groups of seryl or threonyl residues, methylation of the alpha amino groups of lysine, arginine, and histidine side chains (T. E. Creighton, Proteins: Structure and Molecular Properties, W.H. Freeman & Co., San Francisco, pp. 79-86 (1983)), acetylation of the N-terminal amine, and amidation of any C-terminal carboxyl group.

[0809] Another type of covalent modification involves chemically or enzymatically coupling glycosides to the antibody. These procedures are advantageous in that they do not require production of the antibody in a host cell that has glycosylation capabilities for N- or O-linked glycosylation. Depending on the coupling mode used, the sugar(s) may be attached to (a) arginine and histidine, (b) free carboxyl groups, (c) free sulfhydryl groups such as those of cysteine, (d) free hydroxyl groups such as those of serine, threonine, or hydroxyproline, (e) aromatic residues such as those of phenylalanine, tyrosine, or tryptophan, or (f) the amide group of glutamine. These methods are described in WO 87/05330 published 11 Sep. 1987, and in Aplin and Wriston, CRC Crit. Rev. Biochem., pp. 259-306 (1981).

[0810] Removal of any carbohydrate moieties present on the antibody may be accomplished chemically or enzymatically. Chemical deglycosylation requires exposure of the antibody to the compound trifluoromethanesulfonic acid, or an equivalent compound. This treatment results in the cleavage of most or all sugars except the linking sugar (N-acetyl-glucosamine or N-acetylgalactosamine), while leaving the antibody intact. Chemical deglycosylation is described by Hakimuddin, et al. Arch. Biochem. Biophys. 259: 52 (1987) and by Edge et al. Anal. Biochem., 118: 131 (1981). Enzymatic cleavage of carbohydrate moieties on antibodies can be achieved by the use of a variety of endo- and exoglycosidases as described by Thotakura et al. Meth. Enzymol. 138: 350 (1987). Another type of covalent modification of the antibody comprises linking the antibody to one of a variety of nonproteinaceous polymers, e.g., polyethylene glycol, poly-propylene glycol, polyoxyethylated polyols, polyoxyethylated sorbitol, polyoxyethylated glucose, polyoxyethylated glycerol, polyoxyalkylenes, or polysaccharide polymers such as dextran. Such methods are known in the art, see, e.g. U.S. Pat. Nos. 4,640,835; 4,496,689; 4,301,144; 4,670,417; 4,791,192, 4,179,337, 4,766,106, 4,179,337, 4,495,285, 4,609,546 or EP 315 456.

### Computationally Reconstructed Antibodies

[0811] Provided herein are reconstructed polypeptide and nucleic acid consensus sequences for cancer associated antibodies. The consensus sequences are reconstructed in silico. The term “polypeptide consensus sequence” as used herein refers to an amino acid sequence which comprises the most frequently occurring amino acid residues at each location in all immunoglobulins of any particular subclass or subunit structure. The polypeptide consensus sequence may be based on immunoglobulins of a particular species or of many species. A polypeptide “consensus” sequence, “consensus” structure, or “consensus” antibody is understood to encompass a human polypeptide consensus sequence as described in certain embodiments provided herein, and to refer to an amino acid sequence which comprises the most frequently occurring amino acid residues at each location in all human immunoglobulins of any particular subclass or subunit structure. The embodiments herein provide consensus human structures and consensus structures, which consider other species in addition to human.

[0812] The term, “nucleic acid consensus sequence” as used herein refers to a nucleic acid sequence, which comprises the most frequently occurring nucleotide residues at each location in all immunoglobulin nucleic acid sequence of any particular subclass or subunit structure. The nucleic acid consensus sequence may be based on immunoglobulins of a particular species or of many species. A nucleic acid “consensus” sequence, or “consensus” structure, is understood to encompass a human nucleic acid consensus sequence as described in certain embodiments of this invention, and to refer to a nucleic acid sequence which comprises the most frequently occurring nucleotide residues at each location in all human immunoglobulins nucleic acid of any particular subclass or subunit structure.

[0813] Provided herein are consensus human structures and consensus structures of other species in addition to human. Methods to computationally reconstruct the consensus sequences from RNA seq data are described in the examples herein. Non limiting examples of computational tools known in the art for reconstructing full-length antibody repertoires including MIGEC (Shugay et al. 2014), PRESTO (Vander Heiden et al. 2014), MiXCR (Bolotin et al. 2015), and IGREPERTOIRECONSTRUCTOR (Safonova et al. 2015). In some embodiments, the TraCeR pipeline by Stubbington and Teichmann is implemented, which uses de novo assembly after a pre-filtering step against a custom database containing in silico combinations for all known human V and J gene segments/alleles in the International Immunogenetics Information System (IMGT) repository. In some embodiments, another pipeline, VDJPuzzle, is implemented which filters in reads by mapping to TCR genes followed by a Trinity-based assembly; whereby the total reads are then mapped back to the assemblies in order to retrieve reads missed in the initial mapping step, followed by another round of assembly with Trinity. An exemplary method for computationally reconstructing consensus sequences can comprise somatic sequence identification, manual IGV investigation and (if necessary) correction of somatic vdj sequence and identification of germline sequence and CDR regions.

[0814] In some embodiments, RNA-seq FASTQ files retrieved for patients e.g., a cancer patient are recorded and analyzed. Kallisto, BWA, MiXCR or other known tools can be used, in some embodiments, to perform a first alignment of RNA-seq samples to reference V, D and J genes of immunoglobulins in order to identify the repertoire present in the samples. In further embodiments, identical CDR3 sequences are identified and grouped in clonotypes (Bolotin D A et al., Nature Methods, 2015; Bolotin D A et al. Nature Biotechnology, 2017). VDJ tools are used, in some embodiments, (Shugay M. et al. PLoS Computational Biology, 2015) to filter out non-functional (non-coding) clonotypes and to compute basic diversity statistics. In further embodiments, non-functional clonotypes are identified as those containing a stop codon or frameshift in their receptor sequence. In some embodiments, the diversity of the Ig repertoire is obtained based on the effective number of species which is calculated as the exponent of the Shannon-Wiener Entropy index (MacArthur R H. Biological reviews. 1965).

[0815] In some embodiments, further alignments against the immunoglobulin segments present in the samples are performed for viewing the results to explore the frequency distribution of sequence mismatches along the V, D, J gene segments and, in particular in the CDR3 region length statistics. This alignment step can be useful, for example, for summarizing repertoires, as well as offering a detailed view of rearrangements and region alignments for individual query sequences. Exemplary methodology for alignment and assembly is described in the examples herein.

[0816] In some embodiments, the immunoglobulin segments present in the samples are identified using IMGT reference files or equivalent. In some instances, the heavy D segment and light V-J junction sequences can be assembled using an assembler. Non limiting examples of assembler known in the art include Trinity and V'DJer. A FASTA file with corrected heavy D and light V-J junction sequences can be generated for each sample in some embodiments. In addition to the assembled FASTA files, germline FASTA files can be generated, for example, by using IgBLAST v1.9.0 [Ye J, et al Nucleic Acids Research, 2013] and the IMGT database. In further embodiments, the somatic FASTA sequence can be input to IgBLAST to obtain the closest segment ids for the heavy and light chain. The germline FASTA can be generated by merging corresponding segment sequences from the IMGT database. The final assembled FASTA sequences can serve as ‘reference’ sequences for the alignment and visualization steps.

[0817] In further embodiments, using the reference files generated from the assembly step, the FASTQs can be aligned in BowTie2 default mode. Other alignment tools, known in the art, for example STAR or TopHat2 can also be used. The output BAM file can be used for IGV visualization and mutations in the patient can be observed.

[0818] In further embodiments, the identification of the CDR3 region and corresponding V, D, and J chains from the final assembled FASTA sequences can be done, for example with IgBLAST. The standardized output using version v.1.9.0 of IgBLAST can be delivered by wrapping IgBLASTn with default parameters in some instances. In other instances, the output from the IgBLAST service can be extracted using a purpose-built parser tool designed to extract the CDR1, CDR2 and CDR3 nucleotide and amino acid sequences.

### Exemplary Cancer Associated Antibodies or Antigen-Binding Fragments Thereof

[0819] The present disclosure provides cancer associated antibodies comprising a consensus sequence. In some embodiments, the antibodies or antigen-binding fragment thereof induce lysis of cancer cells. Lysis can be induced by any mechanism, such as by mediating an effector function, such as C1q binding and complement dependent cytotoxicity (CDC); Fc receptor binding; antibody-dependent cell-mediated cytotoxicity (ADCC); phagocytosis, or direct induction of cell apoptosis.

[0820] In some embodiments, an antibody or antigen-binding fragment thereof, disclosed herein, is engineered to have at least one increase in effector function as compared to the non-engineered parent antibody or antigen-binding fragment thereof. Effector functions are biological activities attributable to the Fc region of an antibody, which vary with the antibody isotype. Examples of antibody effector functions include: C1q binding and complement dependent cytotoxicity (CDC); Fc receptor binding; antibody-dependent cell-mediated cytotoxicity (ADCC); phagocytosis. For example, an antibody or antigen-binding fragment thereof, disclosed herein can be glycoengineered to have at least one increase in effector function as compared to the non-glycoengineered parent. Antibody-dependent cellular cytotoxicity (ADCC) is the result of the formation of a complex between the IgG Fab portion of the antibody with the viral protein on the cell surface and binding of the Fc portion to the Fc receptors (FcγRs), on effector cells. The increase in effector function can be increased binding affinity to an Fc receptor, increased ADCC; increased cell mediated immunity; increased binding to cytotoxic CD8 T cells; increased binding to NK cells; increased binding to macrophages; increased binding to polymorphonuclear cells; increased binding to monocytes; increased binding to macrophages; increased binding to large granular lymphocytes; increased binding to granulocytes; direct signaling inducing apoptosis; increased dendritic cell maturation; or increased T cell priming.

### Exemplary Sequences of the Antibodies of the Disclosure and Antigen Binding Fragments Thereof

[0821] In one aspect, an antibody or antigen-binding fragment thereof is provided, wherein the antibody or antigen-binding fragment thereof comprises a heavy chain variable domain (VH) having at least 90%, 91%, 92%, 93%, 94%, 95%, 96%, 97%, 98%, 99%, or 100% sequence identity to the amino acid sequence of any one of SEQ ID NOs: 1-271. In some embodiments, a VH sequence having at least 90%, 91%, 92%, 93%, 94%, 95%, 96%, 97%, 98%, or 99% identity contains substitutions (e.g., conservative substitutions), insertions, or deletions relative to the reference sequence, but an antibody or antigen-binding fragment thereof comprising that sequence retains the ability to bind to same antigen as of the parent (e.g., cancer associated antigen). In some embodiments, a total of 1 to 10 amino acids have been substituted, inserted and/or deleted in the amino acid sequence of any one of SEQ ID NOs: 1-271. In some embodiments, substitutions, insertions, or deletions occur in regions outside the CDRs (e.g., in the FRs). Optionally, the antibody or antigen-binding fragment thereof comprises the VH sequence of any one of SEQ ID NOs: 1-271, including one or more post-translational modifications of that sequence. In a particular embodiment, the VH comprises one, two or three CDRs selected from: (a) CDR-H1, comprising the amino acid sequence of any one of SEQ ID NOs: 543-813, (b) CDR-H2, comprising the amino acid sequence of any one of SEQ ID NOs: 1085-1355; and (c) CDR-H3, comprising the amino acid sequence of any one of SEQ ID NOs: 1627-1897.

[0822] In one aspect, an antibody or antigen-binding fragment thereof is provided, wherein the antibody or antigen-binding fragment thereof comprises a light chain variable domain (VL) having at least 90%, 91%, 92%, 93%, 94%, 95%, 96%, 97%, 98%, 99%, or 100% sequence identity to the amino acid sequence of any one of SEQ ID NOs: 272-542. In some embodiments, a VL sequence having at least 90%, 91%, 92%, 93%, 94%, 95%, 96%, 97%, 98%, or 99% identity contains substitutions (e.g., conservative substitutions), insertions, or deletions relative to the reference sequence, but an antibody or antigen-binding fragment thereof comprising that sequence retains the ability to bind to same antigen as the parent (e.g., cancer associated antigen). In some embodiments, a total of 1 to 10 amino acids have been substituted, inserted and/or deleted in the amino acid sequence of any one of SEQ ID NOs: 272-542. In some embodiments, the substitutions, insertions, or deletions occur in regions outside the CDRs (e.g., in the FRs). Optionally, the antibody or antigen-binding fragment thereof comprises the VL sequence of any one of SEQ ID NOs: 272-542, including one or more post-translational modifications of that sequence. In a particular embodiment, the VL comprises one, two or three CDRs selected from: (a) CDR-L1, comprising the amino acid sequence of any one of SEQ ID NOs: 814-1084; (b) CDR-L2, comprising the amino acid sequence of any one of SEQ ID NOs: 1356-1626; and (c) CDR-L3, comprising the amino acid sequence of any one of SEQ ID NOs: 1898-2168.

[0823] In one aspect, an antibody or antigen-binding fragment thereof is provided, wherein the antibody or antigen-binding fragment thereof comprises: a. a VH as in any of the embodiments provided above, and b. a VL as in any of the embodiments provided above, and wherein the selected VH and VL are paired according to table 5. In one aspect, an antibody or antigen-binding fragment thereof is provided, wherein the antibody or antigen-binding fragment thereof comprises: a. a CDR-H1 selected from any CDR-H1 in table 1, and b. a CDR-L1 selected from any CDR-L1 in table 1, wherein the selected CDR-H1 and CDR-L1 are paired according to table 5. In one aspect, an antibody or antigen-binding fragment thereof is provided, wherein the antibody or antigen-binding fragment thereof comprises: a. a CDR-H2 selected from any CDR-H2 in table 1, and b. a CDR-L2 selected from any CDR-L2 in table 1, wherein the selected CDR-H2 and CDR-L2 are paired according to table 5. In one aspect, an antibody or antigen-binding fragment thereof is provided, wherein the antibody or antigen-binding fragment thereof comprises: a. a CDR-H3 selected from any CDR-H3 in table 1, and b. a CDR-L3 selected from any CDR-L3 in table 1, wherein the selected CDR-H3 and CDR-L3 are paired according to table 5. In one aspect, an antibody or antigen-binding fragment thereof is provided, wherein the antibody or antigen-binding fragment thereof comprises: a. a CDR-H1, a CDR-H2, and a CDR-H3 selected from any CDR-H1, a CDR-H2, and a CDR-H3 in table 1, and b. a CDR-L1, a CDR-L2, and a CDR-L3 selected from any CDR-L1, CDR-L2, or CDR-L3 in table 1, wherein the selected CDR-H1, CDR-H2, CDR-H3, CDR-L1, CDR-L2, and CDR-L3 are paired according to table 1.

### TBLA1001

[0824] In one aspect, the present disclosure provides an antibody or antigen-binding fragment thereof comprising at least one or both variable regions selected from the group consisting of (a) VH comprising the amino acid sequence of SEQ ID NO: 1; and (b) VL comprising the amino acid sequence of SEQ ID NO: 272.

[0825] In one aspect, the present disclosure provides an antibody or antigen-binding fragment thereof comprising at least one, two, three, four, five, or six CDRs selected from the group consisting of: (a) CDR-H1 comprising the amino acid sequence of SEQ ID NO: 543, (b) CDR-H2 comprising the amino acid sequence of SEQ ID NO: 1085, (c) CDR-H3 comprising the amino acid sequence of SEQ ID NO: 1627, (d) CDR-L1 comprising the amino acid sequence of SEQ ID NO: 814, (e) CDR-L2 comprising the amino acid sequence of SEQ ID NO: 1356, and (f) CDR-L3 comprising the amino acid sequence of SEQ ID NO: 1898.

[0826] In one aspect, the present disclosure provides an antibody or antigen-binding fragment thereof comprising a. CDR-H1 comprising the amino acid sequence of SEQ ID NO: 543, (b) CDR-H2 comprising the amino acid sequence of SEQ ID NO: 1085, (c) CDR-H3 comprising the amino acid sequence of SEQ ID NO: 1627, (d) CDR-L1 comprising the amino acid sequence of SEQ ID NO: 814, (e) CDR-L2 comprising the amino acid sequence of SEQ ID NO: 1356, and (f) CDR-L3 comprising the amino acid sequence of SEQ ID NO: 1898.

[0827] In one aspect, the present disclosure provides an antibody or antigen-binding fragment thereof comprising CDR-H3 comprising the amino acid sequence of SEQ ID NO: 1627, and CDR-L3 comprising the amino acid sequence of SEQ ID NO: 1898.

[0828] In one aspect, the present disclosure provides an antibody or antigen-binding fragment thereof comprising at least one, at least two, or all three VH CDR sequences selected from: a. CDR-H1 comprising the amino acid sequence of SEQ ID NO: 543; b. CDR-H2 comprising the amino acid sequence of SEQ ID NO: 1085; c. CDR-H3 comprising the amino acid sequence of SEQ ID NO: 1627; and a VL comprising the amino acid sequence of SEQ ID NO: 272.

[0829] In one aspect, the present disclosure provides an antibody or antigen-binding fragment thereof comprising at least one, at least two, or all three VL CDR sequences selected from: a. CDR-L1 comprising the amino acid sequence of SEQ ID NO: 814; b. CDR-L2 comprising the amino acid sequence of SEQ ID NO: 1356; c. CDR-L3 comprising the amino acid sequence of SEQ ID NO: 1898; and a VH comprising the amino acid sequence of SEQ ID NO: 1.

[0830] In one aspect, an antibody or antigen-binding fragment thereof is provided, wherein the antibody or antigen-binding fragment thereof comprises a heavy chain variable domain (VH) having at least 90%, 91%, 92%, 93%, 94%, 95%, 96%, 97%, 98%, 99%, or 100% sequence identity to the amino acid sequence SEQ ID NO: 1. In some embodiments, a VH sequence having at least 90%, 91%, 92%, 93%, 94%, 95%, 96%, 97%, 98%, or 99% identity contains substitutions (e.g., conservative substitutions), insertions, or deletions relative to the reference sequence, but an antibody or antigen-binding fragment thereof comprising that sequence retains the ability to bind to same antigen as of the parent (e.g., cancer associated antigen). In some embodiments, a total of 1 to 10 amino acids have been substituted, inserted and/or deleted in the amino acid sequence SEQ ID NO: 1. In some embodiments, substitutions, insertions, or deletions occur in regions outside the CDRs (e.g., in the FRs). Optionally, the antibody or antigen-binding fragment thereof comprises the VH sequence SEQ ID NO: 1, including one or more post-translational modifications of that sequence. In a particular embodiment, the VH comprises one, two or three CDRs selected from: a. CDR-H1, comprising the amino acid sequence SEQ ID NO: 543; b. CDR-H2, comprising the amino acid sequence SEQ ID NO: 1085; and c. CDR-H3, comprising the amino acid sequence SEQ ID NO: 1627.

[0831] In one aspect, an antibody or antigen-binding fragment thereof is provided, wherein the antibody or antigen-binding fragment thereof comprises a light chain variable domain (VL) having at least 90%, 91%, 92%, 93%, 94%, 95%, 96%, 97%, 98%, 99%, or 100% sequence identity to the amino acid sequence SEQ ID NO: 272. In some embodiments, a VL sequence having at least 90%, 91%, 92%, 93%, 94%, 95%, 96%, 97%, 98%, or 99% identity contains substitutions (e.g., conservative substitutions), insertions, or deletions relative to the reference sequence, but an antibody or antigen-binding fragment thereof comprising that sequence retains the ability to bind to same antigen as the parent (e.g., cancer associated antigen). In some embodiments, a total of 1 to 10 amino acids have been substituted, inserted and/or deleted in the amino acid sequence SEQ ID NO: 272. In some embodiments, the substitutions, insertions, or deletions occur in regions outside the CDRs (e.g., in the FRs). Optionally, the antibody or antigen-binding fragment thereof comprises the VL sequence SEQ ID NO: 272, including one or more post-translational modifications of that sequence. In a particular embodiment, the VL comprises one, two or three CDRs selected from: a. CDR-L1, comprising the amino acid sequence SEQ ID NO: 814; b. CDR-L2, comprising the amino acid sequence SEQ ID NO: 1356; and c. CDR-L3, comprising the amino acid sequence SEQ ID NO: 1898.

[0832] In one aspect, an antibody or antigen-binding fragment thereof is provided, wherein the antibody or antigen-binding fragment thereof comprises a VH as in any of the embodiments provided above, and a VL as in any of the embodiments provided above. In some embodiments, the antibody or antigen-binding fragment thereof comprises the VH amino acid sequence of SEQ ID NO: 1, and the VL amino acid sequence of SEQ ID NO: 272, optionally including post-translational modifications of those sequences. TBLA1002

[0833] In one aspect, the present disclosure provides an antibody or antigen-binding fragment thereof comprising at least one or both variable regions selected from: a. VH comprising the amino acid sequence of SEQ ID NO: 2; and b. VL comprising the amino acid sequence of SEQ ID NO: 273.

[0834] In one aspect, the present disclosure provides an antibody or antigen-binding fragment thereof comprising at least one, two, three, four, five, or six CDRs selected from: a. CDR-H1 comprising the amino acid sequence of SEQ ID NO: 544; b. CDR-H2 comprising the amino acid sequence of SEQ ID NO: 1086, c. CDR-H3 comprising the amino acid sequence of SEQ ID NO: 1628; d. CDR-L1 comprising the amino acid sequence of SEQ ID NO: 815; e. CDR-L2 comprising the amino acid sequence of SEQ ID NO: 1357; and f. CDR-L3 comprising the amino acid sequence of SEQ ID NO: 1899.

[0835] In one aspect, the present disclosure provides an antibody or antigen-binding fragment thereof comprising: a. CDR-H1 comprising the amino acid sequence of SEQ ID NO: 544; b. CDR-H2 comprising the amino acid sequence of SEQ ID NO: 1086, c. CDR-H3 comprising the amino acid sequence of SEQ ID NO: 1628; d. CDR-L1 comprising the amino acid sequence of SEQ ID NO: 815; e. CDR-L2 comprising the amino acid sequence of SEQ ID NO: 1357; and f. CDR-L3 comprising the amino acid sequence of SEQ ID NO: 1899. In one aspect, the present disclosure provides an antibody or antigen-binding fragment thereof comprising CDR-H3 comprising the amino acid sequence of SEQ ID NO: 1628; and CDR-L3 comprising the amino acid sequence of SEQ ID NO: 1899.

[0836] In one aspect, the present disclosure provides an antibody or antigen-binding fragment thereof comprising at least one, at least two, or all three VH CDR sequences selected from: a. CDR-H1 comprising the amino acid sequence of SEQ ID NO: 544; b. CDR-H2 comprising the amino acid sequence of SEQ ID NO: 1086; c. CDR-H3 comprising the amino acid sequence of SEQ ID NO: 1628; and a VL comprising the amino acid sequence of SEQ ID NO: 273.

[0837] In one aspect, the present disclosure provides an antibody or antigen-binding fragment thereof comprising at least one, at least two, or all three VL CDR sequences selected from: a. CDR-L1 comprising the amino acid sequence of SEQ ID NO: 815; b. CDR-L2 comprising the amino acid sequence of SEQ ID NO: 1357; c. CDR-L3 comprising the amino acid sequence of SEQ ID NO: 1899, and a VH comprising the amino acid sequence of SEQ ID NO: 2.

[0838] In one aspect, an antibody or antigen-binding fragment thereof is provided, wherein the antibody or antigen-binding fragment thereof comprises a heavy chain variable domain (VH) having at least 90%, 91%, 92%, 93%, 94%, 95%, 96%, 97%, 98%, 99%, or 100% sequence identity to the amino acid sequence SEQ ID NO: 2. In some embodiments, a VH sequence having at least 90%, 91%, 92%, 93%, 94%, 95%, 96%, 97%, 98%, or 99% identity contains substitutions (e.g., conservative substitutions), insertions, or deletions relative to the reference sequence, but an antibody or antigen-binding fragment thereof comprising that sequence retains the ability to bind to same antigen as of the parent (e.g., cancer associated antigen). In some embodiments, a total of 1 to 10 amino acids have been substituted, inserted and/or deleted in the amino acid sequence SEQ ID NO: 2. In some embodiments, substitutions, insertions, or deletions occur in regions outside the CDRs (e.g., in the FRs). Optionally, the antibody or antigen-binding fragment thereof comprises the VH sequence SEQ ID NO: 2, including one or more post-translational modifications of that sequence. In a particular embodiment, the VH comprises one, two or three CDRs selected from: a. CDR-H1, comprising the amino acid sequence SEQ ID NO: 544; b. CDR-H2, comprising the amino acid sequence SEQ ID NO: 1086; and c. CDR-H3, comprising the amino acid sequence SEQ ID NO: 1628.

[0839] In one aspect, an antibody or antigen-binding fragment thereof is provided, wherein the antibody or antigen-binding fragment thereof comprises a light chain variable domain (VL) having at least 90%, 91%, 92%, 93%, 94%, 95%, 96%, 97%, 98%, 99%, or 100% sequence identity to the amino acid sequence SEQ ID NO: 273. In some embodiments, a VL sequence having at least 90%, 91%, 92%, 93%, 94%, 95%, 96%, 97%, 98%, or 99% identity contains substitutions (e.g., conservative substitutions), insertions, or deletions relative to the reference sequence, but an antibody or antigen-binding fragment thereof comprising that sequence retains the ability to bind to same antigen as the parent (e.g., cancer associated antigen). In some embodiments, a total of 1 to 10 amino acids have been substituted, inserted and/or deleted in the amino acid sequence SEQ ID NO: 273. In some embodiments, the substitutions, insertions, or deletions occur in regions outside the CDRs (e.g., in the FRs). Optionally, the antibody or antigen-binding fragment thereof comprises the VL sequence SEQ ID NO: 273, including one or more post-translational modifications of that sequence. In a particular embodiment, the VL comprises one, two or three CDRs selected from: a. CDR-L1, comprising the amino acid sequence SEQ ID NO: 815; b. CDR-L2, comprising the amino acid sequence SEQ ID NO: 1357; and c. CDR-L3, comprising the amino acid sequence SEQ ID NO: 1899.

[0840] In one aspect, an antibody or antigen-binding fragment thereof is provided, wherein the antibody or antigen-binding fragment thereof comprises a VH as in any of the embodiments provided above, and a VL as in any of the embodiments provided above. In some embodiments, the antibody or antigen-binding fragment thereof comprises the VH amino acid sequence of SEQ ID NO: 2, and the VL amino acid sequence of SEQ ID NO: 273, optionally including post-translational modifications of those sequences. TBLA1003

[0841] In one aspect, the present disclosure provides an antibody or antigen-binding fragment thereof comprising at least one or both variable regions selected from: a. VH comprising the amino acid sequence of SEQ ID NO: 3; and b. VL comprising the amino acid sequence of SEQ ID NO: 274.

[0842] In one aspect, the present disclosure provides an antibody or antigen-binding fragment thereof comprising at least one, two, three, four, five, or six CDRs selected from: a. CDR-H1 comprising the amino acid sequence of SEQ ID NO: 545; b. CDR-H2 comprising the amino acid sequence of SEQ ID NO: 1087; c. CDR-H3 comprising the amino acid sequence of SEQ ID NO: 1629; d. CDR-L1 comprising the amino acid sequence of SEQ ID NO: 816; e. CDR-L2 comprising the amino acid sequence of SEQ ID NO: 1358; and f. CDR-L3 comprising the amino acid sequence of SEQ ID NO: 1900.

[0843] In one aspect, the present disclosure provides an antibody or antigen-binding fragment thereof comprising: a. CDR-H1 comprising the amino acid sequence of SEQ ID NO: 545; b. CDR-H2 comprising the amino acid sequence of SEQ ID NO: 1087; c. CDR-H3 comprising the amino acid sequence of SEQ ID NO: 1629; d. CDR-L1 comprising the amino acid sequence of SEQ ID NO: 816; e. CDR-L2 comprising the amino acid sequence of SEQ ID NO: 1358; and f. CDR-L3 comprising the amino acid sequence of SEQ ID NO: 1900. In one aspect, the present disclosure provides an antibody or antigen-binding fragment thereof comprising CDR-H3 comprising the amino acid sequence of SEQ ID NO: 1629; and CDR-L3 comprising the amino acid sequence of SEQ ID NO: 1900.

[0844] In one aspect, the present disclosure provides an antibody or antigen-binding fragment thereof comprising at least one, at least two, or all three VH CDR sequences selected from: a. CDR-H1 comprising the amino acid sequence of SEQ ID NO: 545; b. CDR-H2 comprising the amino acid sequence of SEQ ID NO: 1087; c. CDR-H3 comprising the amino acid sequence of SEQ ID NO: 1629; and a VL comprising the amino acid sequence of SEQ ID NO: 274.

[0845] In one aspect, the present disclosure provides an antibody or antigen-binding fragment thereof comprising at least one, at least two, or all three VL CDR sequences selected from: a. CDR-L1 comprising the amino acid sequence of SEQ ID NO: 816; b. CDR-L2 comprising the amino acid sequence of SEQ ID NO: 1358; c. CDR-L3 comprising the amino acid sequence of SEQ ID NO: 1900; and a VH comprising the amino acid sequence of SEQ ID NO: 3.

[0846] In one aspect, an antibody or antigen-binding fragment thereof is provided, wherein the antibody or antigen-binding fragment thereof comprises a heavy chain variable domain (VH) having at least 90%, 91%, 92%, 93%, 94%, 95%, 96%, 97%, 98%, 99%, or 100% sequence identity to the amino acid sequence SEQ ID NO: 3. In some embodiments, a VH sequence having at least 90%, 91%, 92%, 93%, 94%, 95%, 96%, 97%, 98%, or 99% identity contains substitutions (e.g., conservative substitutions), insertions, or deletions relative to the reference sequence, but an antibody or antigen-binding fragment thereof comprising that sequence retains the ability to bind to same antigen as of the parent (e.g., cancer associated antigen). In some embodiments, a total of 1 to 10 amino acids have been substituted, inserted and/or deleted in the amino acid sequence SEQ ID NO: 3. In some embodiments, substitutions, insertions, or deletions occur in regions outside the CDRs (e.g., in the FRs). Optionally, the antibody or antigen-binding fragment thereof comprises the VH sequence SEQ ID NO: 3, including one or more post-translational modifications of that sequence. In a particular embodiment, the VH comprises one, two or three CDRs selected from: a. CDR-H1, comprising the amino acid sequence SEQ ID NO: 545; b. CDR-H2, comprising the amino acid sequence SEQ ID NO: 1087; and c. CDR-H3, comprising the amino acid sequence SEQ ID NO: 1629.

[0847] In one aspect, an antibody or antigen-binding fragment thereof is provided, wherein the antibody or antigen-binding fragment thereof comprises a light chain variable domain (VL) having at least 90%, 91%, 92%, 93%, 94%, 95%, 96%, 97%, 98%, 99%, or 100% sequence identity to the amino acid sequence SEQ ID NO: 274. In some embodiments, a VL sequence having at least 90%, 91%, 92%, 93%, 94%, 95%, 96%, 97%, 98%, or 99% identity contains substitutions (e.g., conservative substitutions), insertions, or deletions relative to the reference sequence, but an antibody or antigen-binding fragment thereof comprising that sequence retains the ability to bind to same antigen as the parent (e.g., cancer associated antigen). In some embodiments, a total of 1 to 10 amino acids have been substituted, inserted and/or deleted in the amino acid sequence SEQ ID NO: 274. In some embodiments, the substitutions, insertions, or deletions occur in regions outside the CDRs (e.g., in the FRs). Optionally, the antibody or antigen-binding fragment thereof comprises the VL sequence SEQ ID NO: 274, including one or more post-translational modifications of that sequence. In a particular embodiment, the VL comprises one, two or three CDRs selected from: a CDR-L1, comprising the amino acid sequence SEQ ID NO: 816; b. CDR-L2, comprising the amino acid sequence SEQ ID NO: 1358; and c. CDR-L3, comprising the amino acid sequence SEQ ID NO: 1900.

[0848] In one aspect, an antibody or antigen-binding fragment thereof is provided, wherein the antibody or antigen-binding fragment thereof comprises a VH as in any of the embodiments provided above, and a VL as in any of the embodiments provided above. In some embodiments, the antibody or antigen-binding fragment thereof comprises the VH amino acid sequence of SEQ ID NO: 3, and the VL amino acid sequence of SEQ ID NO: 274, optionally including post-translational modifications of those sequences. TBLA1004

[0849] In one aspect, the present disclosure provides an antibody or antigen-binding fragment thereof comprising at least one or both variable regions selected from: a VH comprising the amino acid sequence of SEQ ID NO: 4; and b. a VL comprising the amino acid sequence of SEQ ID NO: 275.

[0850] In one aspect, the present disclosure provides an antibody or antigen-binding fragment thereof comprising at least one, two, three, four, five, or six CDRs selected from: a. CDR-H1 comprising the amino acid sequence of SEQ ID NO: 546; b. CDR-H2 comprising the amino acid sequence of SEQ ID NO: 1088; c. CDR-H3 comprising the amino acid sequence of SEQ ID NO: 1630; d. CDR-L1 comprising the amino acid sequence of SEQ ID NO: 817; e. CDR-L2 comprising the amino acid sequence of SEQ ID NO: 1359; and f. CDR-L3 comprising the amino acid sequence of SEQ ID NO: 1901.

[0851] In one aspect, the present disclosure provides an antibody or antigen-binding fragment thereof comprising CDR-H3 comprising the amino acid sequence of SEQ ID NO: 1630; d. CDR-L1 comprising the amino acid sequence of SEQ ID NO: 817; e. CDR-L2 comprising the amino acid sequence of SEQ ID NO: 1359; and CDR-L3 comprising the amino acid sequence of SEQ ID NO: 1901. In one aspect, the present disclosure provides an antibody or antigen-binding fragment thereof comprising a. CDR-H1 comprising the amino acid sequence of SEQ ID NO: 546; b. CDR-H2 comprising the amino acid sequence of SEQ ID NO: 1088; c. CDR-H3 comprising the amino acid sequence of SEQ ID NO: 1630; d. CDR-L1 comprising the amino acid sequence of SEQ ID NO: 817; e. CDR-L2 comprising the amino acid sequence of SEQ ID NO: 1359; and f. CDR-L3 comprising the amino acid sequence of SEQ ID NO: 1901.

[0852] In one aspect, the present disclosure provides an antibody or antigen-binding fragment thereof comprising at least one, at least two, or all three VH CDR sequences selected from: a. CDR-H1 comprising the amino acid sequence of SEQ ID NO: 546; b. CDR-H2 comprising the amino acid sequence of SEQ ID NO: 1088, c. CDR-H3 comprising the amino acid sequence of SEQ ID NO: 1630; and a VL comprising the amino acid sequence of SEQ ID NO: 275.

[0853] In one aspect, the present disclosure provides an antibody or antigen-binding fragment thereof comprising at least one, at least two, or all three VL CDR sequences selected from: a. CDR-L1 comprising the amino acid sequence of SEQ ID NO: 817; b. CDR-L2 comprising the amino acid sequence of SEQ ID NO: 1359; c. CDR-L3 comprising the amino acid sequence of SEQ ID NO: 1901; and a VH comprising the amino acid sequence of SEQ ID NO: 4.

[0854] In one aspect, an antibody or antigen-binding fragment thereof is provided, wherein the antibody or antigen-binding fragment thereof comprises a heavy chain variable domain (VH) having at least 90%, 91%, 92%, 93%, 94%, 95%, 96%, 97%, 98%, 99%, or 100% sequence identity to the amino acid sequence SEQ ID NO: 4. In some embodiments, a VH sequence having at least 90%, 91%, 92%, 93%, 94%, 95%, 96%, 97%, 98%, or 99% identity contains substitutions (e.g., conservative substitutions), insertions, or deletions relative to the reference sequence, but an antibody or antigen-binding fragment thereof comprising that sequence retains the ability to bind to same antigen as of the parent (e.g., cancer associated antigen). In some embodiments, a total of 1 to 10 amino acids have been substituted, inserted and/or deleted in the amino acid sequence SEQ ID NO: 4. In some embodiments, substitutions, insertions, or deletions occur in regions outside the CDRs (e.g., in the FRs). Optionally, the antibody or antigen-binding fragment thereof comprises the VH sequence SEQ ID NO: 4, including one or more post-translational modifications of that sequence. In a particular embodiment, the VH comprises one, two or three CDRs selected from: a CDR-H1, comprising the amino acid sequence SEQ ID NO: 546; b CDR-H2, comprising the amino acid sequence SEQ ID NO: 1088; and c. CDR-H3, comprising the amino acid sequence SEQ ID NO: 1630.

[0855] In one aspect, an antibody or antigen-binding fragment thereof is provided, wherein the antibody or antigen-binding fragment thereof comprises a light chain variable domain (VL) having at least 90%, 91%, 92%, 93%, 94%, 95%, 96%, 97%, 98%, 99%, or 100% sequence identity to the amino acid sequence SEQ ID NO: 275. In some embodiments, a VL sequence having at least 90%, 91%, 92%, 93%, 94%, 95%, 96%, 97%, 98%, or 99% identity contains substitutions (e.g., conservative substitutions), insertions, or deletions relative to the reference sequence, but an antibody or antigen-binding fragment thereof comprising that sequence retains the ability to bind to same antigen as the parent (e.g., cancer associated antigen). In some embodiments, a total of 1 to 10 amino acids have been substituted, inserted and/or deleted in the amino acid sequence SEQ ID NO: 275. In some embodiments, the substitutions, insertions, or deletions occur in regions outside the CDRs (e.g., in the FRs). Optionally, the antibody or antigen-binding fragment thereof comprises the VL sequence SEQ ID NO: 275, including one or more post-translational modifications of that sequence. In a particular embodiment, the VL comprises one, two or three CDRs selected from: a. CDR-L1, comprising the amino acid sequence SEQ ID NO: 817; b. CDR-L2, comprising the amino acid sequence SEQ ID NO: 1359; and c. CDR-L3, comprising the amino acid sequence SEQ ID NO: 1901.

[0856] In one aspect, an antibody or antigen-binding fragment thereof is provided, wherein the antibody or antigen-binding fragment thereof comprises a VH as in any of the embodiments provided above, and a VL as in any of the embodiments provided above. In some embodiments, the antibody or antigen-binding fragment thereof comprises the VH amino acid sequence of SEQ ID NO: 4, and the VL amino acid sequence of SEQ ID NO: 275, optionally including post-translational modifications of those sequences.

### TBLA1005

[0857] In one aspect, the present disclosure provides an antibody or antigen-binding fragment thereof comprising at least one or both variable regions selected from: a. VH comprising the amino acid sequence of SEQ ID NO: 5 and b. VL comprising the amino acid sequence of SEQ ID NO: 276.

[0858] In one aspect, the present disclosure provides an antibody or antigen-binding fragment thereof comprising at least one, two, three, four, five, or six CDRs selected from: a. CDR-H1 comprising the amino acid sequence of SEQ ID NO: 547; b. CDR-H2 comprising the amino acid sequence of SEQ ID NO: 1089; c. CDR-H3 comprising the amino acid sequence of SEQ ID NO: 1631; d. CDR-L1 comprising the amino acid sequence of SEQ ID NO: 818; e. CDR-L2 comprising the amino acid sequence of SEQ ID NO: 1360; and f. CDR-L3 comprising the amino acid sequence of SEQ ID NO: 1902.

[0859] In one aspect, the present disclosure provides an antibody or antigen-binding fragment thereof comprising a. CDR-H1 comprising the amino acid sequence of SEQ ID NO: 547; b. CDR-H2 comprising the amino acid sequence of SEQ ID NO: 1089; c. CDR-H3 comprising the amino acid sequence of SEQ ID NO: 1631; d. CDR-L1 comprising the amino acid sequence of SEQ ID NO: 818; e. CDR-L2 comprising the amino acid sequence of SEQ ID NO: 1360; and f. CDR-L3 comprising the amino acid sequence of SEQ ID NO: 1902. In one aspect, the present disclosure provides an antibody or antigen-binding fragment thereof comprising CDR-H3 comprising the amino acid sequence of SEQ ID NO: 1631; and CDR-L3 comprising the amino acid sequence of SEQ ID NO: 1902.

[0860] In one aspect, the present disclosure provides an antibody or antigen-binding fragment thereof comprising at least one, at least two, or all three VH CDR sequences selected from: a. CDR-H1 comprising the amino acid sequence of SEQ ID NO: 547; b. CDR-H2 comprising the amino acid sequence of SEQ ID NO: 1089; c. CDR-H3 comprising the amino acid sequence of SEQ ID NO: 1631; and a VL comprising the amino acid sequence of SEQ ID NO: 276.

[0861] In one aspect, the present disclosure provides an antibody or antigen-binding fragment thereof comprising at least one, at least two, or all three VL CDR sequences selected from: a. CDR-L1 comprising the amino acid sequence of SEQ ID NO: 818; b. CDR-L2 comprising the amino acid sequence of SEQ ID NO: 1360; c. CDR-L3 comprising the amino acid sequence of SEQ ID NO: 1902; and a VH comprising the amino acid sequence of SEQ ID NO: 5.

[0862] In one aspect, an antibody or antigen-binding fragment thereof is provided, wherein the antibody or antigen-binding fragment thereof comprises a heavy chain variable domain (VH) having at least 90%, 91%, 92%, 93%, 94%, 95%, 96%, 97%, 98%, 99%, or 100% sequence identity to the amino acid sequence SEQ ID NO: 5. In some embodiments, a VH sequence having at least 90%, 91%, 92%, 93%, 94%, 95%, 96%, 97%, 98%, or 99% identity contains substitutions (e.g., conservative substitutions), insertions, or deletions relative to the reference sequence, but an antibody or antigen-binding fragment thereof comprising that sequence retains the ability to bind to same antigen as of the parent (e.g., cancer associated antigen). In some embodiments, a total of 1 to 10 amino acids have been substituted, inserted and/or deleted in the amino acid sequence SEQ ID NO: 5. In some embodiments, substitutions, insertions, or deletions occur in regions outside the CDRs (e.g., in the FRs). Optionally, the antibody or antigen-binding fragment thereof comprises the VH sequence SEQ ID NO: 5, including one or more post-translational modifications of that sequence. In a particular embodiment, the VH comprises one, two or three CDRs selected from: a. CDR-H1, comprising the amino acid sequence SEQ ID NO: 547; b. CDR-H2, comprising the amino acid sequence SEQ ID NO: 1089; and c. CDR-H3, comprising the amino acid sequence SEQ ID NO: 1631.

[0863] In one aspect, an antibody or antigen-binding fragment thereof is provided, wherein the antibody or antigen-binding fragment thereof comprises a light chain variable domain (VL) having at least 90%, 91%, 92%, 93%, 94%, 95%, 96%, 97%, 98%, 99%, or 100% sequence identity to the amino acid sequence SEQ ID NO: 276. In some embodiments, a VL sequence having at least 90%, 91%, 92%, 93%, 94%, 95%, 96%, 97%, 98%, or 99% identity contains substitutions (e.g., conservative substitutions), insertions, or deletions relative to the reference sequence, but an antibody or antigen-binding fragment thereof comprising that sequence retains the ability to bind to same antigen as the parent (e.g., cancer associated antigen). In some embodiments, a total of 1 to 10 amino acids have been substituted, inserted and/or deleted in the amino acid sequence SEQ ID NO: 276. In some embodiments, the substitutions, insertions, or deletions occur in regions outside the CDRs (e.g., in the FRs). Optionally, the antibody or antigen-binding fragment thereof comprises the VL sequence SEQ ID NO: 276, including one or more post-translational modifications of that sequence. In a particular embodiment, the VL comprises one, two or three CDRs selected from: a. CDR-L1, comprising the amino acid sequence SEQ ID NO: 818; b. CDR-L2, comprising the amino acid sequence SEQ ID NO: 1360; and c. CDR-L3, comprising the amino acid sequence SEQ ID NO: 1902.

[0864] In one aspect, an antibody or antigen-binding fragment thereof is provided, wherein the antibody or antigen-binding fragment thereof comprises a VH as in any of the embodiments provided above, and a VL as in any of the embodiments provided above. In some embodiments, the antibody or antigen-binding fragment thereof comprises the VH amino acid sequence of SEQ ID NO: 5, and the VL amino acid sequence of SEQ ID NO: 276, optionally including post-translational modifications of those sequences.

### TBLA1006

[0865] In one aspect, the present disclosure provides an antibody or antigen-binding fragment thereof comprising at least one or both variable regions selected from: a. VH comprising the amino acid sequence of SEQ ID NO: 6 and b. VL comprising the amino acid sequence of SEQ ID NO: 277.

[0866] In one aspect, the present disclosure provides an antibody or antigen-binding fragment thereof comprising at least one, two, three, four, five, or six CDRs selected from: a. CDR-H1 comprising the amino acid sequence of SEQ ID NO: 548; b. CDR-H2 comprising the amino acid sequence of SEQ ID NO: 1090; c. CDR-H3 comprising the amino acid sequence of SEQ ID NO: 1632; d. CDR-L1 comprising the amino acid sequence of SEQ ID NO: 819; e. CDR-L2 comprising the amino acid sequence of SEQ ID NO: 1361; and f. CDR-L3 comprising the amino acid sequence of SEQ ID NO: 1903.

[0867] In one aspect, the present disclosure provides an antibody or antigen-binding fragment thereof comprising: a. CDR-H1 comprising the amino acid sequence of SEQ ID NO: 548; b. CDR-H2 comprising the amino acid sequence of SEQ ID NO: 1090; c. CDR-H3 comprising the amino acid sequence of SEQ ID NO: 1632; d. CDR-L1 comprising the amino acid sequence of SEQ ID NO: 819; e. CDR-L2 comprising the amino acid sequence of SEQ ID NO: 1361; and f. CDR-L3 comprising the amino acid sequence of SEQ ID NO: 1903. In one aspect, the present disclosure provides an antibody or antigen-binding fragment thereof comprising CDR-H3 comprising the amino acid sequence of SEQ ID NO: 1632; and CDR-L3 comprising the amino acid sequence of SEQ ID NO: 1903.

[0868] In one aspect, the present disclosure provides an antibody or antigen-binding fragment thereof comprising at least one, at least two, or all three VH CDR sequences selected from: a. CDR-H1 comprising the amino acid sequence of SEQ ID NO: 548; b. CDR-H2 comprising the amino acid sequence of SEQ ID NO: 1090; c. CDR-H3 comprising the amino acid sequence of SEQ ID NO: 1632; and a VL comprising the amino acid sequence of SEQ ID NO: 277.

[0869] In one aspect, the present disclosure provides an antibody or antigen-binding fragment thereof comprising at least one, at least two, or all three VL CDR sequences selected from: a. CDR-L1 comprising the amino acid sequence of SEQ ID NO: 819; b. CDR-L2 comprising the amino acid sequence of SEQ ID NO: 1361; c. CDR-L3 comprising the amino acid sequence of SEQ ID NO: 1903; and a VH comprising the amino acid sequence of SEQ ID NO: 6.

[0870] In one aspect, an antibody or antigen-binding fragment thereof is provided, wherein the antibody or antigen-binding fragment thereof comprises a heavy chain variable domain (VH) having at least 90%, 91%, 92%, 93%, 94%, 95%, 96%, 97%, 98%, 99%, or 100% sequence identity to the amino acid sequence SEQ ID NO: 6. In some embodiments, a VH sequence having at least 90%, 91%, 92%, 93%, 94%, 95%, 96%, 97%, 98%, or 99% identity contains substitutions (e.g., conservative substitutions), insertions, or deletions relative to the reference sequence, but an antibody or antigen-binding fragment thereof comprising that sequence retains the ability to bind to same antigen as of the parent (e.g., cancer associated antigen). In some embodiments, a total of 1 to 10 amino acids have been substituted, inserted and/or deleted in the amino acid sequence SEQ ID NO: 6. In some embodiments, substitutions, insertions, or deletions occur in regions outside the CDRs (e.g., in the FRs). Optionally, the antibody or antigen-binding fragment thereof comprises the VH sequence SEQ ID NO: 6, including one or more post-translational modifications of that sequence. In a particular embodiment, the VH comprises one, two or three CDRs selected from: a. CDR-H1, comprising the amino acid sequence SEQ ID NO: 548; b. CDR-H2, comprising the amino acid sequence SEQ ID NO: 1090; and c. CDR-H3, comprising the amino acid sequence SEQ ID NO: 1632.

[0871] In one aspect, an antibody or antigen-binding fragment thereof is provided, wherein the antibody or antigen-binding fragment thereof comprises a light chain variable domain (VL) having at least 90%, 91%, 92%, 93%, 94%, 95%, 96%, 97%, 98%, 99%, or 100% sequence identity to the amino acid sequence SEQ ID NO: 277. In some embodiments, a VL sequence having at least 90%, 91%, 92%, 93%, 94%, 95%, 96%, 97%, 98%, or 99% identity contains substitutions (e.g., conservative substitutions), insertions, or deletions relative to the reference sequence, but an antibody or antigen-binding fragment thereof comprising that sequence retains the ability to bind to same antigen as the parent (e.g., cancer associated antigen). In some embodiments, a total of 1 to 10 amino acids have been substituted, inserted and/or deleted in the amino acid sequence SEQ ID NO: 277. In some embodiments, the substitutions, insertions, or deletions occur in regions outside the CDRs (e.g., in the FRs). Optionally, the antibody or antigen-binding fragment thereof comprises the VL sequence SEQ ID NO: 277, including one or more post-translational modifications of that sequence. In a particular embodiment, the VL comprises one, two or three CDRs selected from: a. CDR-L1, comprising the amino acid sequence SEQ ID NO: 819; b. CDR-L2, comprising the amino acid sequence SEQ ID NO: 1361; and c. CDR-L3, comprising the amino acid sequence SEQ ID NO: 1903.

[0872] In one aspect, an antibody or antigen-binding fragment thereof is provided, wherein the antibody or antigen-binding fragment thereof comprises a VH as in any of the embodiments provided above, and a VL as in any of the embodiments provided above. In some embodiments, the antibody or antigen-binding fragment thereof comprises the VH amino acid sequence of SEQ ID NO: 6, and the VL amino acid sequence of SEQ ID NO: 277, optionally including post-translational modifications of those sequences.

### TBLA1007

[0873] In one aspect, the present disclosure provides an antibody or antigen-binding fragment thereof comprising at least one or both variable regions selected from: a. VH comprising the amino acid sequence of SEQ ID NO: 7 and b. VL comprising the amino acid sequence of SEQ ID NO: 278.

[0874] In one aspect, the present disclosure provides an antibody or antigen-binding fragment thereof comprising at least one, two, three, four, five, or six CDRs selected from: a. CDR-H1 comprising the amino acid sequence of SEQ ID NO: 549; b. CDR-H2 comprising the amino acid sequence of SEQ ID NO: 1091; c. CDR-H3 comprising the amino acid sequence of SEQ ID NO: 1633; d. CDR-L1 comprising the amino acid sequence of SEQ ID NO: 820; e. CDR-L2 comprising the amino acid sequence of SEQ ID NO: 1362; and f. CDR-L3 comprising the amino acid sequence of SEQ ID NO: 1904.

[0875] In one aspect, the present disclosure provides an antibody or antigen-binding fragment thereof comprising: a. CDR-H1 comprising the amino acid sequence of SEQ ID NO: 549; b. CDR-H2 comprising the amino acid sequence of SEQ ID NO: 1091; c. CDR-H3 comprising the amino acid sequence of SEQ ID NO: 1633; d. CDR-L1 comprising the amino acid sequence of SEQ ID NO: 820; e. CDR-L2 comprising the amino acid sequence of SEQ ID NO: 1362; and f. CDR-L3 comprising the amino acid sequence of SEQ ID NO: 1904. In one aspect, the present disclosure provides an antibody or antigen-binding fragment thereof comprising CDR-H3 comprising the amino acid sequence of SEQ ID NO: 1633; and CDR-L3 comprising the amino acid sequence of SEQ ID NO: 1904.

[0876] In one aspect, the present disclosure provides an antibody or antigen-binding fragment thereof comprising at least one, at least two, or all three VH CDR sequences selected from: a. CDR-H1 comprising the amino acid sequence of SEQ ID NO: 549; b. CDR-H2 comprising the amino acid sequence of SEQ ID NO: 1091; c. CDR-H3 comprising the amino acid sequence of SEQ ID NO: 1633; and a VL comprising the amino acid sequence of SEQ ID NO: 278.

[0877] In one aspect, the present disclosure provides an antibody or antigen-binding fragment thereof comprising at least one, at least two, or all three VL CDR sequences selected from: a. CDR-L1 comprising the amino acid sequence of SEQ ID NO: 820; b. CDR-L2 comprising the amino acid sequence of SEQ ID NO: 1362; c. CDR-L3 comprising the amino acid sequence of SEQ ID NO: 1904; and a VH comprising the amino acid sequence of SEQ ID NO: 7.

[0878] In one aspect, an antibody or antigen-binding fragment thereof is provided, wherein the antibody or antigen-binding fragment thereof comprises a heavy chain variable domain (VH) having at least 90%, 91%, 92%, 93%, 94%, 95%, 96%, 97%, 98%, 99%, or 100% sequence identity to the amino acid sequence SEQ ID NO: 7. In some embodiments, a VH sequence having at least 90%, 91%, 92%, 93%, 94%, 95%, 96%, 97%, 98%, or 99% identity contains substitutions (e.g., conservative substitutions), insertions, or deletions relative to the reference sequence, but an antibody or antigen-binding fragment thereof comprising that sequence retains the ability to bind to same antigen as of the parent (e.g., cancer associated antigen). In some embodiments, a total of 1 to 10 amino acids have been substituted, inserted and/or deleted in the amino acid sequence SEQ ID NO: 7. In some embodiments, substitutions, insertions, or deletions occur in regions outside the CDRs (e.g., in the FRs). Optionally, the antibody or antigen-binding fragment thereof comprises the VH sequence SEQ ID NO: 7, including one or more post-translational modifications of that sequence. In a particular embodiment, the VH comprises one, two or three CDRs selected from: a. CDR-H1, comprising the amino acid sequence SEQ ID NO: 549; b. CDR-H2, comprising the amino acid sequence SEQ ID NO: 1091; and c. CDR-H3, comprising the amino acid sequence SEQ ID NO: 1633.

[0879] In one aspect, an antibody or antigen-binding fragment thereof is provided, wherein the antibody or antigen-binding fragment thereof comprises a light chain variable domain (VL) having at least 90%, 91%, 92%, 93%, 94%, 95%, 96%, 97%, 98%, 99%, or 100% sequence identity to the amino acid sequence SEQ ID NO: 278. In some embodiments, a VL sequence having at least 90%, 91%, 92%, 93%, 94%, 95%, 96%, 97%, 98%, or 99% identity contains substitutions (e.g., conservative substitutions), insertions, or deletions relative to the reference sequence, but an antibody or antigen-binding fragment thereof comprising that sequence retains the ability to bind to same antigen as the parent (e.g., cancer associated antigen). In some embodiments, a total of 1 to 10 amino acids have been substituted, inserted and/or deleted in the amino acid sequence SEQ ID NO: 278. In some embodiments, the substitutions, insertions, or deletions occur in regions outside the CDRs (e.g., in the FRs). Optionally, the antibody or antigen-binding fragment thereof comprises the VL sequence SEQ ID NO: 278, including one or more post-translational modifications of that sequence. In a particular embodiment, the VL comprises one, two or three CDRs selected from: a. CDR-L1, comprising the amino acid sequence SEQ ID NO: 820; b. CDR-L2, comprising the amino acid sequence SEQ ID NO: 1362; and c. CDR-L3, comprising the amino acid sequence SEQ ID NO: 1904.

[0880] In one aspect, an antibody or antigen-binding fragment thereof is provided, wherein the antibody or antigen-binding fragment thereof comprises a VH as in any of the embodiments provided above, and a VL as in any of the embodiments provided above. In some embodiments, the antibody or antigen-binding fragment thereof comprises the VH amino acid sequence of SEQ ID NO: 7, and the VL amino acid sequence of SEQ ID NO: 278, optionally including post-translational modifications of those sequences.

[0881] TBLA1008

[0882] In one aspect, the present disclosure provides an antibody or antigen-binding fragment thereof comprising at least one or both variable regions selected from: a. VH comprising the amino acid sequence of SEQ ID NO: 8 and b. VL comprising the amino acid sequence of SEQ ID NO: 279.

[0883] In one aspect, the present disclosure provides an antibody or antigen-binding fragment thereof comprising at least one, two, three, four, five, or six CDRs selected from: a. CDR-H1 comprising the amino acid sequence of SEQ ID NO: 550; b. CDR-H2 comprising the amino acid sequence of SEQ ID NO: 1092; c. CDR-H3 comprising the amino acid sequence of SEQ ID NO: 1634; d. CDR-L1 comprising the amino acid sequence of SEQ ID NO: 821; e. CDR-L2 comprising the amino acid sequence of SEQ ID NO: 1363; and f. CDR-L3 comprising the amino acid sequence of SEQ ID NO: 1905.

[0884] In one aspect, the present disclosure provides an antibody or antigen-binding fragment thereof comprising: a. CDR-H1 comprising the amino acid sequence of SEQ ID NO: 550; b. CDR-H2 comprising the amino acid sequence of SEQ ID NO: 1092; c. CDR-H3 comprising the amino acid sequence of SEQ ID NO: 1634; d. CDR-L1 comprising the amino acid sequence of SEQ ID NO: 821; e. CDR-L2 comprising the amino acid sequence of SEQ ID NO: 1363; and f. CDR-L3 comprising the amino acid sequence of SEQ ID NO: 1905. In one aspect, the present disclosure provides an antibody or antigen-binding fragment thereof comprising a CDR-H3 comprising the amino acid sequence of SEQ ID NO: 1634; and CDR-L3 comprising the amino acid sequence of SEQ ID NO: 1905.

[0885] In one aspect, the present disclosure provides an antibody or antigen-binding fragment thereof comprising at least one, at least two, or all three VH CDR sequences selected from: a. CDR-H1 comprising the amino acid sequence of SEQ ID NO: 550; b. CDR-H2 comprising the amino acid sequence of SEQ ID NO: 1092; c. CDR-H3 comprising the amino acid sequence of SEQ ID NO: 1634; and a VL comprising the amino acid sequence of SEQ ID NO: 279.

[0886] In one aspect, the present disclosure provides an antibody or antigen-binding fragment thereof comprising at least one, at least two, or all three VL CDR sequences selected from: a. CDR-L1 comprising the amino acid sequence of SEQ ID NO: 821; b. CDR-L2 comprising the amino acid sequence of SEQ ID NO: 1363; c. CDR-L3 comprising the amino acid sequence of SEQ ID NO: 1905; and a VH comprising the amino acid sequence of SEQ ID NO: 8.

[0887] In one aspect, an antibody or antigen-binding fragment thereof is provided, wherein the antibody or antigen-binding fragment thereof comprises a heavy chain variable domain (VH) having at least 90%, 91%, 92%, 93%, 94%, 95%, 96%, 97%, 98%, 99%, or 100% sequence identity to the amino acid sequence SEQ ID NO: 8. In some embodiments, a VH sequence having at least 90%, 91%, 92%, 93%, 94%, 95%, 96%, 97%, 98%, or 99% identity contains substitutions (e.g., conservative substitutions), insertions, or deletions relative to the reference sequence, but an antibody or antigen-binding fragment thereof comprising that sequence retains the ability to bind to same antigen as of the parent (e.g., cancer associated antigen). In some embodiments, a total of 1 to 10 amino acids have been substituted, inserted and/or deleted in the amino acid sequence SEQ ID NO: 8. In some embodiments, substitutions, insertions, or deletions occur in regions outside the CDRs (e.g., in the FRs). Optionally, the antibody or antigen-binding fragment thereof comprises the VH sequence SEQ ID NO: 8, including one or more post-translational modifications of that sequence. In a particular embodiment, the VH comprises one, two or three CDRs selected from: a. CDR-H1, comprising the amino acid sequence SEQ ID NO: 550; b. CDR-H2, comprising the amino acid sequence SEQ ID NO: 1092; and c. CDR-H3, comprising the amino acid sequence SEQ ID NO: 1634.

[0888] In one aspect, an antibody or antigen-binding fragment thereof is provided, wherein the antibody or antigen-binding fragment thereof comprises a light chain variable domain (VL) having at least 90%, 91%, 92%, 93%, 94%, 95%, 96%, 97%, 98%, 99%, or 100% sequence identity to the amino acid sequence SEQ ID NO: 279. In some embodiments, a VL sequence having at least 90%, 91%, 92%, 93%, 94%, 95%, 96%, 97%, 98%, or 99% identity contains substitutions (e.g., conservative substitutions), insertions, or deletions relative to the reference sequence, but an antibody or antigen-binding fragment thereof comprising that sequence retains the ability to bind to same antigen as the parent (e.g., cancer associated antigen). In some embodiments, a total of 1 to 10 amino acids have been substituted, inserted and/or deleted in the amino acid sequence SEQ ID NO: 279. In some embodiments, the substitutions, insertions, or deletions occur in regions outside the CDRs (e.g., in the FRs). Optionally, the antibody or antigen-binding fragment thereof comprises the VL sequence SEQ ID NO: 279, including one or more post-translational modifications of that sequence. In a particular embodiment, the VL comprises one, two or three CDRs selected from: a. CDR-L1, comprising the amino acid sequence SEQ ID NO: 821; b. CDR-L2, comprising the amino acid sequence SEQ ID NO: 1363; and c. CDR-L3, comprising the amino acid sequence SEQ ID NO: 1905.

[0889] In one aspect, an antibody or antigen-binding fragment thereof is provided, wherein the antibody or antigen-binding fragment thereof comprises a VH as in any of the embodiments provided above, and a VL as in any of the embodiments provided above. In some embodiments, the antibody or antigen-binding fragment thereof comprises the VH amino acid sequence of SEQ ID NO: 8, and the VL amino acid sequence of SEQ ID NO: 279, optionally including post-translational modifications of those sequences.

### TBLA1009

[0890] In one aspect, the present disclosure provides an antibody or antigen-binding fragment thereof comprising at least one or both variable regions selected from: a. VH comprising the amino acid sequence of SEQ ID NO: 9 and b. VL comprising the amino acid sequence of SEQ ID NO: 280.

[0891] In one aspect, the present disclosure provides an antibody or antigen-binding fragment thereof comprising at least one, two, three, four, five, or six CDRs selected from: a. CDR-H1 comprising the amino acid sequence of SEQ ID NO: 551; b. CDR-H2 comprising the amino acid sequence of SEQ ID NO: 1093; c. CDR-H3 comprising the amino acid sequence of SEQ ID NO: 1635; d. CDR-L1 comprising the amino acid sequence of SEQ ID NO: 822; e. CDR-L2 comprising the amino acid sequence of SEQ ID NO: 1364; and f. CDR-L3 comprising the amino acid sequence of SEQ ID NO: 1906.

[0892] In one aspect, the present disclosure provides an antibody or antigen-binding fragment thereof comprising: a. CDR-H1 comprising the amino acid sequence of SEQ ID NO: 551; b. CDR-H2 comprising the amino acid sequence of SEQ ID NO: 1093; c. CDR-H3 comprising the amino acid sequence of SEQ ID NO: 1635; d. CDR-L1 comprising the amino acid sequence of SEQ ID NO: 822; e. CDR-L2 comprising the amino acid sequence of SEQ ID NO: 1364; and f. CDR-L3 comprising the amino acid sequence of SEQ ID NO: 1906. In one aspect, the present disclosure provides an antibody or antigen-binding fragment thereof comprising a CDR-H3 comprising the amino acid sequence of SEQ ID NO: 1635; and a CDR-L3 comprising the amino acid sequence of SEQ ID NO: 1906.

[0893] In one aspect, the present disclosure provides an antibody or antigen-binding fragment thereof comprising at least one, at least two, or all three VH CDR sequences selected from: a. CDR-H1 comprising the amino acid sequence of SEQ ID NO: 551; b. CDR-H2 comprising the amino acid sequence of SEQ ID NO: 1093; c. CDR-H3 comprising the amino acid sequence of SEQ ID NO: 1635; and a VL comprising the amino acid sequence of SEQ ID NO: 280.

[0894] In one aspect, the present disclosure provides an antibody or antigen-binding fragment thereof comprising at least one, at least two, or all three VL CDR sequences selected from: a. CDR-L1 comprising the amino acid sequence of SEQ ID NO: 822; b. CDR-L2 comprising the amino acid sequence of SEQ ID NO: 1364; c. CDR-L3 comprising the amino acid sequence of SEQ ID NO: 1906; and a VH comprising the amino acid sequence of SEQ ID NO: 9.

[0895] In one aspect, an antibody or antigen-binding fragment thereof is provided, wherein the antibody or antigen-binding fragment thereof comprises a heavy chain variable domain (VH) having at least 90%, 91%, 92%, 93%, 94%, 95%, 96%, 97%, 98%, 99%, or 100% sequence identity to the amino acid sequence SEQ ID NO: 9. In some embodiments, a VH sequence having at least 90%, 91%, 92%, 93%, 94%, 95%, 96%, 97%, 98%, or 99% identity contains substitutions (e.g., conservative substitutions), insertions, or deletions relative to the reference sequence, but an antibody or antigen-binding fragment thereof comprising that sequence retains the ability to bind to same antigen as of the parent (e.g., cancer associated antigen). In some embodiments, a total of 1 to 10 amino acids have been substituted, inserted and/or deleted in the amino acid sequence SEQ ID NO: 9. In some embodiments, substitutions, insertions, or deletions occur in regions outside the CDRs (e.g., in the FRs). Optionally, the antibody or antigen-binding fragment thereof comprises the VH sequence SEQ ID NO: 9, including one or more post-translational modifications of that sequence. In a particular embodiment, the VH comprises one, two or three CDRs selected from: a. CDR-H1, comprising the amino acid sequence SEQ ID NO: 551; b. CDR-H2, comprising the amino acid sequence SEQ ID NO: 1093; and c. CDR-H3, comprising the amino acid sequence SEQ ID NO: 1635.

[0896] In one aspect, an antibody or antigen-binding fragment thereof is provided, wherein the antibody or antigen-binding fragment thereof comprises a light chain variable domain (VL) having at least 90%, 91%, 92%, 93%, 94%, 95%, 96%, 97%, 98%, 99%, or 100% sequence identity to the amino acid sequence SEQ ID NO: 280. In some embodiments, a VL sequence having at least 90%, 91%, 92%, 93%, 94%, 95%, 96%, 97%, 98%, or 99% identity contains substitutions (e.g., conservative substitutions), insertions, or deletions relative to the reference sequence, but an antibody or antigen-binding fragment thereof comprising that sequence retains the ability to bind to same antigen as the parent (e.g., cancer associated antigen). In some embodiments, a total of 1 to 10 amino acids have been substituted, inserted and/or deleted in the amino acid sequence SEQ ID NO: 280. In some embodiments, the substitutions, insertions, or deletions occur in regions outside the CDRs (e.g., in the FRs). Optionally, the antibody or antigen-binding fragment thereof comprises the VL sequence SEQ ID NO: 280, including one or more post-translational modifications of that sequence. In a particular embodiment, the VL comprises one, two or three CDRs selected from: a. CDR-L1, comprising the amino acid sequence SEQ ID NO: 822; b. CDR-L2, comprising the amino acid sequence SEQ ID NO: 1364; and c. CDR-L3, comprising the amino acid sequence SEQ ID NO: 1906.

[0897] In one aspect, an antibody or antigen-binding fragment thereof is provided, wherein the antibody or antigen-binding fragment thereof comprises a VH as in any of the embodiments provided above, and a VL as in any of the embodiments provided above. In some embodiments, the antibody or antigen-binding fragment thereof comprises the VH amino acid sequence of SEQ ID NO: 9, and the VL amino acid sequence of SEQ ID NO: 280, optionally including post-translational modifications of those sequences.

### TBLA1010

[0898] In one aspect, the present disclosure provides an antibody or antigen-binding fragment thereof comprising at least one or both variable regions selected from: a. VH comprising the amino acid sequence of SEQ ID NO: 10 and b. VL comprising the amino acid sequence of SEQ ID NO: 281.

[0899] In one aspect, the present disclosure provides an antibody or antigen-binding fragment thereof comprising at least one, two, three, four, five, or six CDRs selected from: a. CDR-H1 comprising the amino acid sequence of SEQ ID NO: 552; b. CDR-H2 comprising the amino acid sequence of SEQ ID NO: 1094; c. CDR-H3 comprising the amino acid sequence of SEQ ID NO: 1636; d. CDR-L1 comprising the amino acid sequence of SEQ ID NO: 823; e. CDR-L2 comprising the amino acid sequence of SEQ ID NO: 1365; and f. CDR-L3 comprising the amino acid sequence of SEQ ID NO: 1907.

[0900] In one aspect, the present disclosure provides an antibody or antigen-binding fragment thereof comprising: a. CDR-H1 comprising the amino acid sequence of SEQ ID NO: 552; b. CDR-H2 comprising the amino acid sequence of SEQ ID NO: 1094; c. CDR-H3 comprising the amino acid sequence of SEQ ID NO: 1636; d. CDR-L1 comprising the amino acid sequence of SEQ ID NO: 823; e. CDR-L2 comprising the amino acid sequence of SEQ ID NO: 1365; and f. CDR-L3 comprising the amino acid sequence of SEQ ID NO: 1907. In one aspect, the present disclosure provides an antibody or antigen-binding fragment thereof comprising a CDR-H3 comprising the amino acid sequence of SEQ ID NO: 1636; and a CDR-L3 comprising the amino acid sequence of SEQ ID NO: 1907.

[0901] In one aspect, the present disclosure provides an antibody or antigen-binding fragment thereof comprising at least one, at least two, or all three VH CDR sequences selected from: a. CDR-H1 comprising the amino acid sequence of SEQ ID NO: 552; b. CDR-H2 comprising the amino acid sequence of SEQ ID NO: 1094; c. CDR-H3 comprising the amino acid sequence of SEQ ID NO: 1636; and a VL comprising the amino acid sequence of SEQ ID NO: 281.

[0902] In one aspect, the present disclosure provides an antibody or antigen-binding fragment thereof comprising at least one, at least two, or all three VL CDR sequences selected from: a. CDR-L1 comprising the amino acid sequence of SEQ ID NO: 823; b. CDR-L2 comprising the amino acid sequence of SEQ ID NO: 1365; c. CDR-L3 comprising the amino acid sequence of SEQ ID NO: 1907; and a VH comprising the amino acid sequence of SEQ ID NO: 10.

[0903] In one aspect, an antibody or antigen-binding fragment thereof is provided, wherein the antibody or antigen-binding fragment thereof comprises a heavy chain variable domain (VH) having at least 90%, 91%, 92%, 93%, 94%, 95%, 96%, 97%, 98%, 99%, or 100% sequence identity to the amino acid sequence SEQ ID NO: 10. In some embodiments, a VH sequence having at least 90%, 91%, 92%, 93%, 94%, 95%, 96%, 97%, 98%, or 99% identity contains substitutions (e.g., conservative substitutions), insertions, or deletions relative to the reference sequence, but an antibody or antigen-binding fragment thereof comprising that sequence retains the ability to bind to same antigen as of the parent (e.g., cancer associated antigen). In some embodiments, a total of 1 to 10 amino acids have been substituted, inserted and/or deleted in the amino acid sequence SEQ ID NO: 10. In some embodiments, substitutions, insertions, or deletions occur in regions outside the CDRs (e.g., in the FRs). Optionally, the antibody or antigen-binding fragment thereof comprises the VH sequence SEQ ID NO: 10, including one or more post-translational modifications of that sequence. In a particular embodiment, the VH comprises one, two or three CDRs selected from: a. CDR-H1, comprising the amino acid sequence SEQ ID NO: 552; b. CDR-H2, comprising the amino acid sequence SEQ ID NO: 1094; and a CDR-H3, comprising the amino acid sequence SEQ ID NO: 1636.

[0904] In one aspect, an antibody or antigen-binding fragment thereof is provided, wherein the antibody or antigen-binding fragment thereof comprises a light chain variable domain (VL) having at least 90%, 91%, 92%, 93%, 94%, 95%, 96%, 97%, 98%, 99%, or 100% sequence identity to the amino acid sequence SEQ ID NO: 281. In some embodiments, a VL sequence having at least 90%, 91%, 92%, 93%, 94%, 95%, 96%, 97%, 98%, or 99% identity contains substitutions (e.g., conservative substitutions), insertions, or deletions relative to the reference sequence, but an antibody or antigen-binding fragment thereof comprising that sequence retains the ability to bind to same antigen as the parent (e.g., cancer associated antigen). In some embodiments, a total of 1 to 10 amino acids have been substituted, inserted and/or deleted in the amino acid sequence SEQ ID NO: 281. In some embodiments, the substitutions, insertions, or deletions occur in regions outside the CDRs (e.g., in the FRs). Optionally, the antibody or antigen-binding fragment thereof comprises the VL sequence SEQ ID NO: 281, including one or more post-translational modifications of that sequence. In a particular embodiment, the VL comprises one, two or three CDRs selected from: a. CDR-L1, comprising the amino acid sequence SEQ ID NO: 823; b. CDR-L2, comprising the amino acid sequence SEQ ID NO: 1365; and c. CDR-L3, comprising the amino acid sequence SEQ ID NO: 1907.

[0905] In one aspect, an antibody or antigen-binding fragment thereof is provided, wherein the antibody or antigen-binding fragment thereof comprises a VH as in any of the embodiments provided above, and a VL as in any of the embodiments provided above. In some embodiments, the antibody or antigen-binding fragment thereof comprises the VH amino acid sequence of SEQ ID NO: 10, and the VL amino acid sequence of SEQ ID NO: 281, optionally including post-translational modifications of those sequences.

### TBLA1011

[0906] In one aspect, the present disclosure provides an antibody or antigen-binding fragment thereof comprising at least one or both variable regions selected from: a. VH comprising the amino acid sequence of SEQ ID NO: 11 and VL comprising the amino acid sequence of SEQ ID NO: 282.

[0907] In one aspect, the present disclosure provides an antibody or antigen-binding fragment thereof comprising at least one, two, three, four, five, or six CDRs selected from: a. CDR-H1 comprising the amino acid sequence of SEQ ID NO: 553; b. CDR-H2 comprising the amino acid sequence of SEQ ID NO: 1095; c. CDR-H3 comprising the amino acid sequence of SEQ ID NO: 1637; d. CDR-L1 comprising the amino acid sequence of SEQ ID NO: 824; e. CDR-L2 comprising the amino acid sequence of SEQ ID NO: 1366; and f. CDR-L3 comprising the amino acid sequence of SEQ ID NO: 1908.

[0908] In one aspect, the present disclosure provides an antibody or antigen-binding fragment thereof comprising: a. CDR-H1 comprising the amino acid sequence of SEQ ID NO: 553; b. CDR-H2 comprising the amino acid sequence of SEQ ID NO: 1095; c. CDR-H3 comprising the amino acid sequence of SEQ ID NO: 1637; d. CDR-L1 comprising the amino acid sequence of SEQ ID NO: 824; e. CDR-L2 comprising the amino acid sequence of SEQ ID NO: 1366; and f. CDR-L3 comprising the amino acid sequence of SEQ ID NO: 1908. In one aspect, the present disclosure provides an antibody or antigen-binding fragment thereof comprising a CDR-H3 comprising the amino acid sequence of SEQ ID NO: 1637; and a CDR-L3 comprising the amino acid sequence of SEQ ID NO: 1908.

[0909] In one aspect, the present disclosure provides an antibody or antigen-binding fragment thereof comprising at least one, at least two, or all three VH CDR sequences selected from: a. CDR-H1 comprising the amino acid sequence of SEQ ID NO: 553; b. CDR-H2 comprising the amino acid sequence of SEQ ID NO: 1095; c. CDR-H3 comprising the amino acid sequence of SEQ ID NO: 1637; and a VL comprising the amino acid sequence of SEQ ID NO: 282.

[0910] In one aspect, the present disclosure provides an antibody or antigen-binding fragment thereof comprising at least one, at least two, or all three VL CDR sequences selected from: a. CDR-L1 comprising the amino acid sequence of SEQ ID NO: 824; b. CDR-L2 comprising the amino acid sequence of SEQ ID NO: 1366; c. CDR-L3 comprising the amino acid sequence of SEQ ID NO: 1908; and a VH comprising the amino acid sequence of SEQ ID NO: 11.

[0911] In one aspect, an antibody or antigen-binding fragment thereof is provided, wherein the antibody or antigen-binding fragment thereof comprises a heavy chain variable domain (VH) having at least 90%, 91%, 92%, 93%, 94%, 95%, 96%, 97%, 98%, 99%, or 100% sequence identity to the amino acid sequence SEQ ID NO: 11. In some embodiments, a VH sequence having at least 90%, 91%, 92%, 93%, 94%, 95%, 96%, 97%, 98%, or 99% identity contains substitutions (e.g., conservative substitutions), insertions, or deletions relative to the reference sequence, but an antibody or antigen-binding fragment thereof comprising that sequence retains the ability to bind to same antigen as of the parent (e.g., cancer associated antigen). In some embodiments, a total of 1 to 10 amino acids have been substituted, inserted and/or deleted in the amino acid sequence SEQ ID NO: 11. In some embodiments, substitutions, insertions, or deletions occur in regions outside the CDRs (e.g., in the FRs). Optionally, the antibody or antigen-binding fragment thereof comprises the VH sequence SEQ ID NO: 11, including one or more post-translational modifications of that sequence. In a particular embodiment, the VH comprises one, two or three CDRs selected from: a. CDR-H1, comprising the amino acid sequence SEQ ID NO: 553; b. CDR-H2, comprising the amino acid sequence SEQ ID NO: 1095; and c. CDR-H3, comprising the amino acid sequence SEQ ID NO: 1637.

[0912] In one aspect, an antibody or antigen-binding fragment thereof is provided, wherein the antibody or antigen-binding fragment thereof comprises a light chain variable domain (VL) having at least 90%, 91%, 92%, 93%, 94%, 95%, 96%, 97%, 98%, 99%, or 100% sequence identity to the amino acid sequence SEQ ID NO: 282. In some embodiments, a VL sequence having at least 90%, 91%, 92%, 93%, 94%, 95%, 96%, 97%, 98%, or 99% identity contains substitutions (e.g., conservative substitutions), insertions, or deletions relative to the reference sequence, but an antibody or antigen-binding fragment thereof comprising that sequence retains the ability to bind to same antigen as the parent (e.g., cancer associated antigen). In some embodiments, a total of 1 to 10 amino acids have been substituted, inserted and/or deleted in the amino acid sequence SEQ ID NO: 282. In some embodiments, the substitutions, insertions, or deletions occur in regions outside the CDRs (e.g., in the FRs). Optionally, the antibody or antigen-binding fragment thereof comprises the VL sequence SEQ ID NO: 282, including one or more post-translational modifications of that sequence. In a particular embodiment, the VL comprises one, two or three CDRs selected from: a. CDR-L1, comprising the amino acid sequence SEQ ID NO: 824; b. CDR-L2, comprising the amino acid sequence SEQ ID NO: 1366; and c. CDR-L3, comprising the amino acid sequence SEQ ID NO: 1908.

[0913] In one aspect, an antibody or antigen-binding fragment thereof is provided, wherein the antibody or antigen-binding fragment thereof comprises a VH as in any of the embodiments provided above, and a VL as in any of the embodiments provided above. In some embodiments, the antibody or antigen-binding fragment thereof comprises the VH amino acid sequence of SEQ ID NO: 11, and the VL amino acid sequence of SEQ ID NO: 282, optionally including post-translational modifications of those sequences.

### TBLA1012

[0914] In one aspect, the present disclosure provides an antibody or antigen-binding fragment thereof comprising at least one or both variable regions selected from: a. VH comprising the amino acid sequence of SEQ ID NO: 12 and b. VL comprising the amino acid sequence of SEQ ID NO: 283.

[0915] In one aspect, the present disclosure provides an antibody or antigen-binding fragment thereof comprising at least one, two, three, four, five, or six CDRs selected from: a. CDR-H1 comprising the amino acid sequence of SEQ ID NO: 554; b. CDR-H2 comprising the amino acid sequence of SEQ ID NO: 1096; c. CDR-H3 comprising the amino acid sequence of SEQ ID NO: 1638; d. CDR-L1 comprising the amino acid sequence of SEQ ID NO: 825; e. CDR-L2 comprising the amino acid sequence of SEQ ID NO: 1367; and f. CDR-L3 comprising the amino acid sequence of SEQ ID NO: 1909.

[0916] In one aspect, the present disclosure provides an antibody or antigen-binding fragment thereof comprising: a. CDR-H1 comprising the amino acid sequence of SEQ ID NO: 554; b. CDR-H2 comprising the amino acid sequence of SEQ ID NO: 1096; c. CDR-H3 comprising the amino acid sequence of SEQ ID NO: 1638; d. CDR-L1 comprising the amino acid sequence of SEQ ID NO: 825; e. CDR-L2 comprising the amino acid sequence of SEQ ID NO: 1367; and f. CDR-L3 comprising the amino acid sequence of SEQ ID NO: 1909. In one aspect, the present disclosure provides an antibody or antigen-binding fragment thereof comprising a CDR-H3 comprising the amino acid sequence of SEQ ID NO: 1638 and a CDR-L3 comprising the amino acid sequence of SEQ ID NO: 1909.

[0917] In one aspect, the present disclosure provides an antibody or antigen-binding fragment thereof comprising at least one, at least two, or all three VH CDR sequences selected from: a. CDR-H1 comprising the amino acid sequence of SEQ ID NO: 554; b. CDR-H2 comprising the amino acid sequence of SEQ ID NO: 1096; c. CDR-H3 comprising the amino acid sequence of SEQ ID NO: 1638; and a VL comprising the amino acid sequence of SEQ ID NO: 283.

[0918] In one aspect, the present disclosure provides an antibody or antigen-binding fragment thereof comprising at least one, at least two, or all three VL CDR sequences selected from: a CDR-L1 comprising the amino acid sequence of SEQ ID NO: 825; b CDR-L2 comprising the amino acid sequence of SEQ ID NO: 1367; c CDR-L3 comprising the amino acid sequence of SEQ ID NO: 1909; and a VH comprising the amino acid sequence of SEQ ID NO: 12.

[0919] In one aspect, an antibody or antigen-binding fragment thereof is provided, wherein the antibody or antigen-binding fragment thereof comprises a heavy chain variable domain (VH) having at least 90%, 91%, 92%, 93%, 94%, 95%, 96%, 97%, 98%, 99%, or 100% sequence identity to the amino acid sequence SEQ ID NO: 12. In some embodiments, a VH sequence having at least 90%, 91%, 92%, 93%, 94%, 95%, 96%, 97%, 98%, or 99% identity contains substitutions (e.g., conservative substitutions), insertions, or deletions relative to the reference sequence, but an antibody or antigen-binding fragment thereof comprising that sequence retains the ability to bind to same antigen as of the parent (e.g., cancer associated antigen). In some embodiments, a total of 1 to 10 amino acids have been substituted, inserted and/or deleted in the amino acid sequence SEQ ID NO: 12. In some embodiments, substitutions, insertions, or deletions occur in regions outside the CDRs (e.g., in the FRs). Optionally, the antibody or antigen-binding fragment thereof comprises the VH sequence SEQ ID NO: 12, including one or more post-translational modifications of that sequence. In a particular embodiment, the VH comprises one, two or three CDRs selected from: a. CDR-H1, comprising the amino acid sequence SEQ ID NO: 554; b. CDR-H2, comprising the amino acid sequence SEQ ID NO: 1096; and c. CDR-H3, comprising the amino acid sequence SEQ ID NO: 1638.

[0920] In one aspect, an antibody or antigen-binding fragment thereof is provided, wherein the antibody or antigen-binding fragment thereof comprises a light chain variable domain (VL) having at least 90%, 91%, 92%, 93%, 94%, 95%, 96%, 97%, 98%, 99%, or 100% sequence identity to the amino acid sequence SEQ ID NO: 283. In some embodiments, a VL sequence having at least 90%, 91%, 92%, 93%, 94%, 95%, 96%, 97%, 98%, or 99% identity contains substitutions (e.g., conservative substitutions), insertions, or deletions relative to the reference sequence, but an antibody or antigen-binding fragment thereof comprising that sequence retains the ability to bind to same antigen as the parent (e.g., cancer associated antigen). In some embodiments, a total of 1 to 10 amino acids have been substituted, inserted and/or deleted in the amino acid sequence SEQ ID NO: 283. In some embodiments, the substitutions, insertions, or deletions occur in regions outside the CDRs (e.g., in the FRs). Optionally, the antibody or antigen-binding fragment thereof comprises the VL sequence SEQ ID NO: 283, including one or more post-translational modifications of that sequence. In a particular embodiment, the VL comprises one, two or three CDRs selected from: a. CDR-L1, comprising the amino acid sequence SEQ ID NO: 825; b. CDR-L2, comprising the amino acid sequence SEQ ID NO: 1367; and c. CDR-L3, comprising the amino acid sequence SEQ ID NO: 1909.

[0921] In one aspect, an antibody or antigen-binding fragment thereof is provided, wherein the antibody or antigen-binding fragment thereof comprises a VH as in any of the embodiments provided above, and a VL as in any of the embodiments provided above. In some embodiments, the antibody or antigen-binding fragment thereof comprises the VH amino acid sequence of SEQ ID NO: 12, and the VL amino acid sequence of SEQ ID NO: 283, optionally including post-translational modifications of those sequences.

### TBLA1013

[0922] In one aspect, the present disclosure provides an antibody or antigen-binding fragment thereof comprising at least one or both variable regions selected from: a. VH comprising the amino acid sequence of SEQ ID NO: 13 and b. VL comprising the amino acid sequence of SEQ ID NO: 284.

[0923] In one aspect, the present disclosure provides an antibody or antigen-binding fragment thereof comprising at least one, two, three, four, five, or six CDRs selected from: a. CDR-H1 comprising the amino acid sequence of SEQ ID NO: 555; b. CDR-H2 comprising the amino acid sequence of SEQ ID NO: 1097; c. CDR-H3 comprising the amino acid sequence of SEQ ID NO: 1639; d. CDR-L1 comprising the amino acid sequence of SEQ ID NO: 826; e. CDR-L2 comprising the amino acid sequence of SEQ ID NO: 1368; and f. CDR-L3 comprising the amino acid sequence of SEQ ID NO: 1910.

[0924] In one aspect, the present disclosure provides an antibody or antigen-binding fragment thereof comprising: a. CDR-H1 comprising the amino acid sequence of SEQ ID NO: 555; b. CDR-H2 comprising the amino acid sequence of SEQ ID NO: 1097; c. CDR-H3 comprising the amino acid sequence of SEQ ID NO: 1639; d. CDR-L1 comprising the amino acid sequence of SEQ ID NO: 826; e. CDR-L2 comprising the amino acid sequence of SEQ ID NO: 1368; and f. CDR-L3 comprising the amino acid sequence of SEQ ID NO: 1910. In one aspect, the present disclosure provides an antibody or antigen-binding fragment thereof comprising a CDR-H3 comprising the amino acid sequence of SEQ ID NO: 1639; and a CDR-L3 comprising the amino acid sequence of SEQ ID NO: 1910.

[0925] In one aspect, the present disclosure provides an antibody or antigen-binding fragment thereof comprising at least one, at least two, or all three VH CDR sequences selected from: a. CDR-H1 comprising the amino acid sequence of SEQ ID NO: 555; b. CDR-H2 comprising the amino acid sequence of SEQ ID NO: 1097; c. CDR-H3 comprising the amino acid sequence of SEQ ID NO: 1639; and a VL comprising the amino acid sequence of SEQ ID NO: 284.

[0926] In one aspect, the present disclosure provides an antibody or antigen-binding fragment thereof comprising at least one, at least two, or all three VL CDR sequences selected from: a. CDR-L1 comprising the amino acid sequence of SEQ ID NO: 826; b. CDR-L2 comprising the amino acid sequence of SEQ ID NO: 1368; c. CDR-L3 comprising the amino acid sequence of SEQ ID NO: 1910; and a VH comprising the amino acid sequence of SEQ ID NO: 13.

[0927] In one aspect, an antibody or antigen-binding fragment thereof is provided, wherein the antibody or antigen-binding fragment thereof comprises a heavy chain variable domain (VH) having at least 90%, 91%, 92%, 93%, 94%, 95%, 96%, 97%, 98%, 99%, or 100% sequence identity to the amino acid sequence SEQ ID NO: 13. In some embodiments, a VH sequence having at least 90%, 91%, 92%, 93%, 94%, 95%, 96%, 97%, 98%, or 99% identity contains substitutions (e.g., conservative substitutions), insertions, or deletions relative to the reference sequence, but an antibody or antigen-binding fragment thereof comprising that sequence retains the ability to bind to same antigen as of the parent (e.g., cancer associated antigen). In some embodiments, a total of 1 to 10 amino acids have been substituted, inserted and/or deleted in the amino acid sequence SEQ ID NO: 13. In some embodiments, substitutions, insertions, or deletions occur in regions outside the CDRs (e.g., in the FRs). Optionally, the antibody or antigen-binding fragment thereof comprises the VH sequence SEQ ID NO: 13, including one or more post-translational modifications of that sequence. In a particular embodiment, the VH comprises one, two or three CDRs selected from: a. CDR-H1, comprising the amino acid sequence SEQ ID NO: 555; b. CDR-H2, comprising the amino acid sequence SEQ ID NO: 1097; and c. CDR-H3, comprising the amino acid sequence SEQ ID NO: 1639.

[0928] In one aspect, an antibody or antigen-binding fragment thereof is provided, wherein the antibody or antigen-binding fragment thereof comprises a light chain variable domain (VL) having at least 90%, 91%, 92%, 93%, 94%, 95%, 96%, 97%, 98%, 99%, or 100% sequence identity to the amino acid sequence SEQ ID NO: 284. In some embodiments, a VL sequence having at least 90%, 91%, 92%, 93%, 94%, 95%, 96%, 97%, 98%, or 99% identity contains substitutions (e.g., conservative substitutions), insertions, or deletions relative to the reference sequence, but an antibody or antigen-binding fragment thereof comprising that sequence retains the ability to bind to same antigen as the parent (e.g., cancer associated antigen). In some embodiments, a total of 1 to 10 amino acids have been substituted, inserted and/or deleted in the amino acid sequence SEQ ID NO: 284. In some embodiments, the substitutions, insertions, or deletions occur in regions outside the CDRs (e.g., in the FRs). Optionally, the antibody or antigen-binding fragment thereof comprises the VL sequence SEQ ID NO: 284, including one or more post-translational modifications of that sequence. In a particular embodiment, the VL comprises one, two or three CDRs selected from: a. CDR-L1, comprising the amino acid sequence SEQ ID NO: 826; b. CDR-L2, comprising the amino acid sequence SEQ ID NO: 1368; and c. CDR-L3, comprising the amino acid sequence SEQ ID NO: 1910.

[0929] In one aspect, an antibody or antigen-binding fragment thereof is provided, wherein the antibody or antigen-binding fragment thereof comprises a VH as in any of the embodiments provided above, and a VL as in any of the embodiments provided above. In some embodiments, the antibody or antigen-binding fragment thereof comprises the VH amino acid sequence of SEQ ID NO: 13, and the VL amino acid sequence of SEQ ID NO: 284, optionally including post-translational modifications of those sequences.

### TBRE1001

[0930] In one aspect, the present disclosure provides an antibody or antigen-binding fragment thereof comprising at least one or both variable regions selected from: a. VH comprising the amino acid sequence of SEQ ID NO: 14 and b. VL comprising the amino acid sequence of SEQ ID NO: 285.

[0931] In one aspect, the present disclosure provides an antibody or antigen-binding fragment thereof comprising at least one, two, three, four, five, or six CDRs selected from: a. CDR-H1 comprising the amino acid sequence of SEQ ID NO: 556; b. CDR-H2 comprising the amino acid sequence of SEQ ID NO: 1098; c. CDR-H3 comprising the amino acid sequence of SEQ ID NO: 1640; d. CDR-L1 comprising the amino acid sequence of SEQ ID NO: 827; e. CDR-L2 comprising the amino acid sequence of SEQ ID NO: 1369; and f. CDR-L3 comprising the amino acid sequence of SEQ ID NO: 1911.

[0932] In one aspect, the present disclosure provides an antibody or antigen-binding fragment thereof comprising: a. CDR-H1 comprising the amino acid sequence of SEQ ID NO: 556; b. CDR-H2 comprising the amino acid sequence of SEQ ID NO: 1098; c. CDR-H3 comprising the amino acid sequence of SEQ ID NO: 1640; d. CDR-L1 comprising the amino acid sequence of SEQ ID NO: 827; e. CDR-L2 comprising the amino acid sequence of SEQ ID NO: 1369; and f. CDR-L3 comprising the amino acid sequence of SEQ ID NO: 1911. In one aspect, the present disclosure provides an antibody or antigen-binding fragment thereof comprising a CDR-H3 comprising the amino acid sequence of SEQ ID NO: 1640; and a CDR-L3 comprising the amino acid sequence of SEQ ID NO: 1911.

[0933] In one aspect, the present disclosure provides an antibody or antigen-binding fragment thereof comprising at least one, at least two, or all three VH CDR sequences selected from: a. CDR-H1 comprising the amino acid sequence of SEQ ID NO: 556; b. CDR-H2 comprising the amino acid sequence of SEQ ID NO: 1098; c. CDR-H3 comprising the amino acid sequence of SEQ ID NO: 1640; and a VL comprising the amino acid sequence of SEQ ID NO: 285.

[0934] In one aspect, the present disclosure provides an antibody or antigen-binding fragment thereof comprising at least one, at least two, or all three VL CDR sequences selected from: a. CDR-L1 comprising the amino acid sequence of SEQ ID NO: 827; b. CDR-L2 comprising the amino acid sequence of SEQ ID NO: 1369; c. CDR-L3 comprising the amino acid sequence of SEQ ID NO: 1911; and a VH comprising the amino acid sequence of SEQ ID NO: 14.

[0935] In one aspect, an antibody or antigen-binding fragment thereof is provided, wherein the antibody or antigen-binding fragment thereof comprises a heavy chain variable domain (VH) having at least 90%, 91%, 92%, 93%, 94%, 95%, 96%, 97%, 98%, 99%, or 100% sequence identity to the amino acid sequence SEQ ID NO: 14. In some embodiments, a VH sequence having at least 90%, 91%, 92%, 93%, 94%, 95%, 96%, 97%, 98%, or 99% identity contains substitutions (e.g., conservative substitutions), insertions, or deletions relative to the reference sequence, but an antibody or antigen-binding fragment thereof comprising that sequence retains the ability to bind to same antigen as of the parent (e.g., cancer associated antigen). In some embodiments, a total of 1 to 10 amino acids have been substituted, inserted and/or deleted in the amino acid sequence SEQ ID NO: 14. In some embodiments, substitutions, insertions, or deletions occur in regions outside the CDRs (e.g., in the FRs). Optionally, the antibody or antigen-binding fragment thereof comprises the VH sequence SEQ ID NO: 14, including one or more post-translational modifications of that sequence. In a particular embodiment, the VH comprises one, two or three CDRs selected from: a. CDR-H1, comprising the amino acid sequence SEQ ID NO: 556; b. CDR-H2, comprising the amino acid sequence SEQ ID NO: 1098; and c. CDR-H3, comprising the amino acid sequence SEQ ID NO: 1640.

[0936] In one aspect, an antibody or antigen-binding fragment thereof is provided, wherein the antibody or antigen-binding fragment thereof comprises a light chain variable domain (VL) having at least 90%, 91%, 92%, 93%, 94%, 95%, 96%, 97%, 98%, 99%, or 100% sequence identity to the amino acid sequence SEQ ID NO: 285. In some embodiments, a VL sequence having at least 90%, 91%, 92%, 93%, 94%, 95%, 96%, 97%, 98%, or 99% identity contains substitutions (e.g., conservative substitutions), insertions, or deletions relative to the reference sequence, but an antibody or antigen-binding fragment thereof comprising that sequence retains the ability to bind to same antigen as the parent (e.g., cancer associated antigen). In some embodiments, a total of 1 to 10 amino acids have been substituted, inserted and/or deleted in the amino acid sequence SEQ ID NO: 285. In some embodiments, the substitutions, insertions, or deletions occur in regions outside the CDRs (e.g., in the FRs). Optionally, the antibody or antigen-binding fragment thereof comprises the VL sequence SEQ ID NO: 285, including one or more post-translational modifications of that sequence. In a particular embodiment, the VL comprises one, two or three CDRs selected from: a. CDR-L1, comprising the amino acid sequence SEQ ID NO: 827; b. CDR-L2, comprising the amino acid sequence SEQ ID NO: 1369; and c. CDR-L3, comprising the amino acid sequence SEQ ID NO: 1911.

[0937] In one aspect, an antibody or antigen-binding fragment thereof is provided, wherein the antibody or antigen-binding fragment thereof comprises a VH as in any of the embodiments provided above, and a VL as in any of the embodiments provided above. In some embodiments, the antibody or antigen-binding fragment thereof comprises the VH amino acid sequence of SEQ ID NO: 14, and the VL amino acid sequence of SEQ ID NO: 285, optionally including post-translational modifications of those sequences.

### TBRE1002

[0938] In one aspect, the present disclosure provides an antibody or antigen-binding fragment thereof comprising at least one or both variable regions selected from: a. VH comprising the amino acid sequence of SEQ ID NO: 15 and b. VL comprising the amino acid sequence of SEQ ID NO: 286.

[0939] In one aspect, the present disclosure provides an antibody or antigen-binding fragment thereof comprising at least one, two, three, four, five, or six CDRs selected from: a. CDR-H1 comprising the amino acid sequence of SEQ ID NO: 557; b. CDR-H2 comprising the amino acid sequence of SEQ ID NO: 1099; c. CDR-H3 comprising the amino acid sequence of SEQ ID NO: 1641; d. CDR-L1 comprising the amino acid sequence of SEQ ID NO: 828; e. CDR-L2 comprising the amino acid sequence of SEQ ID NO: 1370; and f. CDR-L3 comprising the amino acid sequence of SEQ ID NO: 1912.

[0940] In one aspect, the present disclosure provides an antibody or antigen-binding fragment thereof comprising: a. CDR-H1 comprising the amino acid sequence of SEQ ID NO: 557; b. CDR-H2 comprising the amino acid sequence of SEQ ID NO: 1099; c. CDR-H3 comprising the amino acid sequence of SEQ ID NO: 1641; d. CDR-L1 comprising the amino acid sequence of SEQ ID NO: 828; e. CDR-L2 comprising the amino acid sequence of SEQ ID NO: 1370; and f. CDR-L3 comprising the amino acid sequence of SEQ ID NO: 1912. In one aspect, the present disclosure provides an antibody or antigen-binding fragment thereof comprising a CDR-H3 comprising the amino acid sequence of SEQ ID NO: 1641; and a CDR-L3 comprising the amino acid sequence of SEQ ID NO: 1912.

[0941] In one aspect, the present disclosure provides an antibody or antigen-binding fragment thereof comprising at least one, at least two, or all three VH CDR sequences selected from: a. CDR-H1 comprising the amino acid sequence of SEQ ID NO: 557; b. CDR-H2 comprising the amino acid sequence of SEQ ID NO: 1099; c. CDR-H3 comprising the amino acid sequence of SEQ ID NO: 1641; and a VL comprising the amino acid sequence of SEQ ID NO: 286.

[0942] In one aspect, the present disclosure provides an antibody or antigen-binding fragment thereof comprising at least one, at least two, or all three VL CDR sequences selected from: a. CDR-L1 comprising the amino acid sequence of SEQ ID NO: 828; b. CDR-L2 comprising the amino acid sequence of SEQ ID NO: 1370; c. CDR-L3 comprising the amino acid sequence of SEQ ID NO: 1912; and a VH comprising the amino acid sequence of SEQ ID NO: 15.

[0943] In one aspect, an antibody or antigen-binding fragment thereof is provided, wherein the antibody or antigen-binding fragment thereof comprises a heavy chain variable domain (VH) having at least 90%, 91%, 92%, 93%, 94%, 95%, 96%, 97%, 98%, 99%, or 100% sequence identity to the amino acid sequence SEQ ID NO: 15. In some embodiments, a VH sequence having at least 90%, 91%, 92%, 93%, 94%, 95%, 96%, 97%, 98%, or 99% identity contains substitutions (e.g., conservative substitutions), insertions, or deletions relative to the reference sequence, but an antibody or antigen-binding fragment thereof comprising that sequence retains the ability to bind to same antigen as of the parent (e.g., cancer associated antigen). In some embodiments, a total of 1 to 10 amino acids have been substituted, inserted and/or deleted in the amino acid sequence SEQ ID NO: 15. In some embodiments, substitutions, insertions, or deletions occur in regions outside the CDRs (e.g., in the FRs). Optionally, the antibody or antigen-binding fragment thereof comprises the VH sequence SEQ ID NO: 15, including one or more post-translational modifications of that sequence. In a particular embodiment, the VH comprises one, two or three CDRs selected from: a. CDR-H1, comprising the amino acid sequence SEQ ID NO: 557; b. CDR-H2, comprising the amino acid sequence SEQ ID NO: 1099; and c. CDR-H3, comprising the amino acid sequence SEQ ID NO: 1641.

[0944] In one aspect, an antibody or antigen-binding fragment thereof is provided, wherein the antibody or antigen-binding fragment thereof comprises a light chain variable domain (VL) having at least 90%, 91%, 92%, 93%, 94%, 95%, 96%, 97%, 98%, 99%, or 100% sequence identity to the amino acid sequence SEQ ID NO: 286. In some embodiments, a VL sequence having at least 90%, 91%, 92%, 93%, 94%, 95%, 96%, 97%, 98%, or 99% identity contains substitutions (e.g., conservative substitutions), insertions, or deletions relative to the reference sequence, but an antibody or antigen-binding fragment thereof comprising that sequence retains the ability to bind to same antigen as the parent (e.g., cancer associated antigen). In some embodiments, a total of 1 to 10 amino acids have been substituted, inserted and/or deleted in the amino acid sequence SEQ ID NO: 286. In some embodiments, the substitutions, insertions, or deletions occur in regions outside the CDRs (e.g., in the FRs). Optionally, the antibody or antigen-binding fragment thereof comprises the VL sequence SEQ ID NO: 286, including one or more post-translational modifications of that sequence. In a particular embodiment, the VL comprises one, two or three CDRs selected from: a. CDR-L1, comprising the amino acid sequence SEQ ID NO: 828; b. CDR-L2, comprising the amino acid sequence SEQ ID NO: 1370; and c. CDR-L3, comprising the amino acid sequence SEQ ID NO: 1912.

[0945] In one aspect, an antibody or antigen-binding fragment thereof is provided, wherein the antibody or antigen-binding fragment thereof comprises a VH as in any of the embodiments provided above, and a VL as in any of the embodiments provided above. In some embodiments, the antibody or antigen-binding fragment thereof comprises the VH amino acid sequence of SEQ ID NO: 15, and the VL amino acid sequence of SEQ ID NO: 286, optionally including post-translational modifications of those sequences.

### TBRE1003

[0946] In one aspect, the present disclosure provides an antibody or antigen-binding fragment thereof comprising at least one or both variable regions selected from: a. VH comprising the amino acid sequence of SEQ ID NO: 16 and b. VL comprising the amino acid sequence of SEQ ID NO: 287.

[0947] In one aspect, the present disclosure provides an antibody or antigen-binding fragment thereof comprising at least one, two, three, four, five, or six CDRs selected from: a. CDR-H1 comprising the amino acid sequence of SEQ ID NO: 558; b. CDR-H2 comprising the amino acid sequence of SEQ ID NO: 1100; c. CDR-H3 comprising the amino acid sequence of SEQ ID NO: 1642; d. CDR-L1 comprising the amino acid sequence of SEQ ID NO: 829; e. CDR-L2 comprising the amino acid sequence of SEQ ID NO: 1371; and f. CDR-L3 comprising the amino acid sequence of SEQ ID NO: 1913.

[0948] In one aspect, the present disclosure provides an antibody or antigen-binding fragment thereof comprising: a. CDR-H1 comprising the amino acid sequence of SEQ ID NO: 558; b. CDR-H2 comprising the amino acid sequence of SEQ ID NO: 1100; c. CDR-H3 comprising the amino acid sequence of SEQ ID NO: 1642; d. CDR-L1 comprising the amino acid sequence of SEQ ID NO: 829; e. CDR-L2 comprising the amino acid sequence of SEQ ID NO: 1371; and f. CDR-L3 comprising the amino acid sequence of SEQ ID NO: 1913. In one aspect, the present disclosure provides an antibody or antigen-binding fragment thereof comprising a CDR-H3 comprising the amino acid sequence of SEQ ID NO: 1642; and a CDR-L3 comprising the amino acid sequence of SEQ ID NO: 1913.

[0949] In one aspect, the present disclosure provides an antibody or antigen-binding fragment thereof comprising at least one, at least two, or all three VH CDR sequences selected from: a. CDR-H1 comprising the amino acid sequence of SEQ ID NO: 558; b. CDR-H2 comprising the amino acid sequence of SEQ ID NO: 1100; c. CDR-H3 comprising the amino acid sequence of SEQ ID NO: 1642; and a VL comprising the amino acid sequence of SEQ ID NO: 287.

[0950] In one aspect, the present disclosure provides an antibody or antigen-binding fragment thereof comprising at least one, at least two, or all three VL CDR sequences selected from: a. CDR-L1 comprising the amino acid sequence of SEQ ID NO: 829; b. CDR-L2 comprising the amino acid sequence of SEQ ID NO: 1371; c. CDR-L3 comprising the amino acid sequence of SEQ ID NO: 1913; and a VH comprising the amino acid sequence of SEQ ID NO: 16.

[0951] In one aspect, an antibody or antigen-binding fragment thereof is provided, wherein the antibody or antigen-binding fragment thereof comprises a heavy chain variable domain (VH) having at least 90%, 91%, 92%, 93%, 94%, 95%, 96%, 97%, 98%, 99%, or 100% sequence identity to the amino acid sequence SEQ ID NO: 16. In some embodiments, a VH sequence having at least 90%, 91%, 92%, 93%, 94%, 95%, 96%, 97%, 98%, or 99% identity contains substitutions (e.g., conservative substitutions), insertions, or deletions relative to the reference sequence, but an antibody or antigen-binding fragment thereof comprising that sequence retains the ability to bind to same antigen as of the parent (e.g., cancer associated antigen). In some embodiments, a total of 1 to 10 amino acids have been substituted, inserted and/or deleted in the amino acid sequence SEQ ID NO: 16. In some embodiments, substitutions, insertions, or deletions occur in regions outside the CDRs (e.g., in the FRs). Optionally, the antibody or antigen-binding fragment thereof comprises the VH sequence SEQ ID NO: 16, including one or more post-translational modifications of that sequence. In a particular embodiment, the VH comprises one, two or three CDRs selected from: a. CDR-H1, comprising the amino acid sequence SEQ ID NO: 558; b. CDR-H2, comprising the amino acid sequence SEQ ID NO: 1100; and c. CDR-H3, comprising the amino acid sequence SEQ ID NO: 1642.

[0952] In one aspect, an antibody or antigen-binding fragment thereof is provided, wherein the antibody or antigen-binding fragment thereof comprises a light chain variable domain (VL) having at least 90%, 91%, 92%, 93%, 94%, 95%, 96%, 97%, 98%, 99%, or 100% sequence identity to the amino acid sequence SEQ ID NO: 287. In some embodiments, a VL sequence having at least 90%, 91%, 92%, 93%, 94%, 95%, 96%, 97%, 98%, or 99% identity contains substitutions (e.g., conservative substitutions), insertions, or deletions relative to the reference sequence, but an antibody or antigen-binding fragment thereof comprising that sequence retains the ability to bind to same antigen as the parent (e.g., cancer associated antigen). In some embodiments, a total of 1 to 10 amino acids have been substituted, inserted and/or deleted in the amino acid sequence SEQ ID NO: 287. In some embodiments, the substitutions, insertions, or deletions occur in regions outside the CDRs (e.g., in the FRs). Optionally, the antibody or antigen-binding fragment thereof comprises the VL sequence SEQ ID NO: 287, including one or more post-translational modifications of that sequence. In a particular embodiment, the VL comprises one, two or three CDRs selected from: a. CDR-L1, comprising the amino acid sequence SEQ ID NO: 829; b. CDR-L2, comprising the amino acid sequence SEQ ID NO: 1371; and c. CDR-L3, comprising the amino acid sequence SEQ ID NO: 1913.

[0953] In one aspect, an antibody or antigen-binding fragment thereof is provided, wherein the antibody or antigen-binding fragment thereof comprises a VH as in any of the embodiments provided above, and a VL as in any of the embodiments provided above. In some embodiments, the antibody or antigen-binding fragment thereof comprises the VH amino acid sequence of SEQ ID NO: 16, and the VL amino acid sequence of SEQ ID NO: 287, optionally including post-translational modifications of those sequences.

### TBRE1004

[0954] In one aspect, the present disclosure provides an antibody or antigen-binding fragment thereof comprising at least one or both variable regions selected from: a. VH comprising the amino acid sequence of SEQ ID NO: 17 and b. VL comprising the amino acid sequence of SEQ ID NO: 288.

[0955] In one aspect, the present disclosure provides an antibody or antigen-binding fragment thereof comprising at least one, two, three, four, five, or six CDRs selected from: a. CDR-H1 comprising the amino acid sequence of SEQ ID NO: 559; b. CDR-H2 comprising the amino acid sequence of SEQ ID NO: 1101; c. CDR-H3 comprising the amino acid sequence of SEQ ID NO: 1643; d. CDR-L1 comprising the amino acid sequence of SEQ ID NO: 830; e. CDR-L2 comprising the amino acid sequence of SEQ ID NO: 1372; and f. CDR-L3 comprising the amino acid sequence of SEQ ID NO: 1914.

[0956] In one aspect, the present disclosure provides an antibody or antigen-binding fragment thereof comprising: a. CDR-H1 comprising the amino acid sequence of SEQ ID NO: 559; b. CDR-H2 comprising the amino acid sequence of SEQ ID NO: 1101; c. CDR-H3 comprising the amino acid sequence of SEQ ID NO: 1643; d. CDR-L1 comprising the amino acid sequence of SEQ ID NO: 830; e. CDR-L2 comprising the amino acid sequence of SEQ ID NO: 1372; and f. CDR-L3 comprising the amino acid sequence of SEQ ID NO: 1914. In one aspect, the present disclosure provides an antibody or antigen-binding fragment thereof comprising a CDR-H3 comprising the amino acid sequence of SEQ ID NO: 1643; and a CDR-L3 comprising the amino acid sequence of SEQ ID NO: 1914.

[0957] In one aspect, the present disclosure provides an antibody or antigen-binding fragment thereof comprising at least one, at least two, or all three VH CDR sequences selected from: a. CDR-H1 comprising the amino acid sequence of SEQ ID NO: 559; b. CDR-H2 comprising the amino acid sequence of SEQ ID NO: 1101; c. CDR-H3 comprising the amino acid sequence of SEQ ID NO: 1643; and a VL comprising the amino acid sequence of SEQ ID NO: 288.

[0958] In one aspect, the present disclosure provides an antibody or antigen-binding fragment thereof comprising at least one, at least two, or all three VL CDR sequences selected from: a. CDR-L1 comprising the amino acid sequence of SEQ ID NO: 830; b. CDR-L2 comprising the amino acid sequence of SEQ ID NO: 1372; c. CDR-L3 comprising the amino acid sequence of SEQ ID NO: 1914; and a VH comprising the amino acid sequence of SEQ ID NO: 17.

[0959] In one aspect, an antibody or antigen-binding fragment thereof is provided, wherein the antibody or antigen-binding fragment thereof comprises a heavy chain variable domain (VH) having at least 90%, 91%, 92%, 93%, 94%, 95%, 96%, 97%, 98%, 99%, or 100% sequence identity to the amino acid sequence SEQ ID NO: 17. In some embodiments, a VH sequence having at least 90%, 91%, 92%, 93%, 94%, 95%, 96%, 97%, 98%, or 99% identity contains substitutions (e.g., conservative substitutions), insertions, or deletions relative to the reference sequence, but an antibody or antigen-binding fragment thereof comprising that sequence retains the ability to bind to same antigen as of the parent (e.g., cancer associated antigen). In some embodiments, a total of 1 to 10 amino acids have been substituted, inserted and/or deleted in the amino acid sequence SEQ ID NO: 17. In some embodiments, substitutions, insertions, or deletions occur in regions outside the CDRs (e.g., in the FRs). Optionally, the antibody or antigen-binding fragment thereof comprises the VH sequence SEQ ID NO: 17, including one or more post-translational modifications of that sequence. In a particular embodiment, the VH comprises one, two or three CDRs selected from: a. CDR-H1, comprising the amino acid sequence SEQ ID NO: 559; b. CDR-H2, comprising the amino acid sequence SEQ ID NO: 1101; and c. CDR-H3, comprising the amino acid sequence SEQ ID NO: 1643.

[0960] In one aspect, an antibody or antigen-binding fragment thereof is provided, wherein the antibody or antigen-binding fragment thereof comprises a light chain variable domain (VL) having at least 90%, 91%, 92%, 93%, 94%, 95%, 96%, 97%, 98%, 99%, or 100% sequence identity to the amino acid sequence SEQ ID NO: 288. In some embodiments, a VL sequence having at least 90%, 91%, 92%, 93%, 94%, 95%, 96%, 97%, 98%, or 99% identity contains substitutions (e.g., conservative substitutions), insertions, or deletions relative to the reference sequence, but an antibody or antigen-binding fragment thereof comprising that sequence retains the ability to bind to same antigen as the parent (e.g., cancer associated antigen). In some embodiments, a total of 1 to 10 amino acids have been substituted, inserted and/or deleted in the amino acid sequence SEQ ID NO: 288. In some embodiments, the substitutions, insertions, or deletions occur in regions outside the CDRs (e.g., in the FRs). Optionally, the antibody or antigen-binding fragment thereof comprises the VL sequence SEQ ID NO: 288, including one or more post-translational modifications of that sequence. In a particular embodiment, the VL comprises one, two or three CDRs selected from: a. CDR-L1, comprising the amino acid sequence SEQ ID NO: 830; b. CDR-L2, comprising the amino acid sequence SEQ ID NO: 1372; and c. CDR-L3, comprising the amino acid sequence SEQ ID NO: 1914.

[0961] In one aspect, an antibody or antigen-binding fragment thereof is provided, wherein the antibody or antigen-binding fragment thereof comprises a VH as in any of the embodiments provided above, and a VL as in any of the embodiments provided above. In some embodiments, the antibody or antigen-binding fragment thereof comprises the VH amino acid sequence of SEQ ID NO: 17, and the VL amino acid sequence of SEQ ID NO: 288, optionally including post-translational modifications of those sequences.

### TBRE1005

[0962] In one aspect, the present disclosure provides an antibody or antigen-binding fragment thereof comprising at least one or both variable regions selected from: a. VH comprising the amino acid sequence of SEQ ID NO: 18 and b. VL comprising the amino acid sequence of SEQ ID NO: 289.

[0963] In one aspect, the present disclosure provides an antibody or antigen-binding fragment thereof comprising at least one, two, three, four, five, or six CDRs selected from: a. CDR-H1 comprising the amino acid sequence of SEQ ID NO: 560; b. CDR-H2 comprising the amino acid sequence of SEQ ID NO: 1102; c. CDR-H3 comprising the amino acid sequence of SEQ ID NO: 1644; d. CDR-L1 comprising the amino acid sequence of SEQ ID NO: 831; e. CDR-L2 comprising the amino acid sequence of SEQ ID NO: 1373; and f. CDR-L3 comprising the amino acid sequence of SEQ ID NO: 1915.

[0964] In one aspect, the present disclosure provides an antibody or antigen-binding fragment thereof comprising: a. CDR-H1 comprising the amino acid sequence of SEQ ID NO: 560; b. CDR-H2 comprising the amino acid sequence of SEQ ID NO: 1102; c. CDR-H3 comprising the amino acid sequence of SEQ ID NO: 1644; d. CDR-L1 comprising the amino acid sequence of SEQ ID NO: 831; e. CDR-L2 comprising the amino acid sequence of SEQ ID NO: 1373; and f. CDR-L3 comprising the amino acid sequence of SEQ ID NO: 1915. In one aspect, the present disclosure provides an antibody or antigen-binding fragment thereof comprising a CDR-H3 comprising the amino acid sequence of SEQ ID NO: 1644; and a CDR-L3 comprising the amino acid sequence of SEQ ID NO: 1915.

[0965] In one aspect, the present disclosure provides an antibody or antigen-binding fragment thereof comprising at least one, at least two, or all three VH CDR sequences selected from: a. CDR-H1 comprising the amino acid sequence of SEQ ID NO: 560; b. CDR-H2 comprising the amino acid sequence of SEQ ID NO: 1102; c. CDR-H3 comprising the amino acid sequence of SEQ ID NO: 1644; and a VL comprising the amino acid sequence of SEQ ID NO: 289.

[0966] In one aspect, the present disclosure provides an antibody or antigen-binding fragment thereof comprising at least one, at least two, or all three VL CDR sequences selected from: a. CDR-L1 comprising the amino acid sequence of SEQ ID NO: 831; b. CDR-L2 comprising the amino acid sequence of SEQ ID NO: 1373; c. CDR-L3 comprising the amino acid sequence of SEQ ID NO: 1915; and a VH comprising the amino acid sequence of SEQ ID NO: 18.

[0967] In one aspect, an antibody or antigen-binding fragment thereof is provided, wherein the antibody or antigen-binding fragment thereof comprises a heavy chain variable domain (VH) having at least 90%, 91%, 92%, 93%, 94%, 95%, 96%, 97%, 98%, 99%, or 100% sequence identity to the amino acid sequence SEQ ID NO: 18. In some embodiments, a VH sequence having at least 90%, 91%, 92%, 93%, 94%, 95%, 96%, 97%, 98%, or 99% identity contains substitutions (e.g., conservative substitutions), insertions, or deletions relative to the reference sequence, but an antibody or antigen-binding fragment thereof comprising that sequence retains the ability to bind to same antigen as of the parent (e.g., cancer associated antigen). In some embodiments, a total of 1 to 10 amino acids have been substituted, inserted and/or deleted in the amino acid sequence SEQ ID NO: 18. In some embodiments, substitutions, insertions, or deletions occur in regions outside the CDRs (e.g., in the FRs). Optionally, the antibody or antigen-binding fragment thereof comprises the VH sequence SEQ ID NO: 18, including one or more post-translational modifications of that sequence. In a particular embodiment, the VH comprises one, two or three CDRs selected from: a. CDR-H1, comprising the amino acid sequence SEQ ID NO: 560; b. CDR-H2, comprising the amino acid sequence SEQ ID NO: 1102; and c. CDR-H3, comprising the amino acid sequence SEQ ID NO: 1644.

[0968] In one aspect, an antibody or antigen-binding fragment thereof is provided, wherein the antibody or antigen-binding fragment thereof comprises a light chain variable domain (VL) having at least 90%, 91%, 92%, 93%, 94%, 95%, 96%, 97%, 98%, 99%, or 100% sequence identity to the amino acid sequence SEQ ID NO: 289. In some embodiments, a VL sequence having at least 90%, 91%, 92%, 93%, 94%, 95%, 96%, 97%, 98%, or 99% identity contains substitutions (e.g., conservative substitutions), insertions, or deletions relative to the reference sequence, but an antibody or antigen-binding fragment thereof comprising that sequence retains the ability to bind to same antigen as the parent (e.g., cancer associated antigen). In some embodiments, a total of 1 to 10 amino acids have been substituted, inserted and/or deleted in the amino acid sequence SEQ ID NO: 289. In some embodiments, the substitutions, insertions, or deletions occur in regions outside the CDRs (e.g., in the FRs). Optionally, the antibody or antigen-binding fragment thereof comprises the VL sequence SEQ ID NO: 289, including one or more post-translational modifications of that sequence. In a particular embodiment, the VL comprises one, two or three CDRs selected from: a. CDR-L1, comprising the amino acid sequence SEQ ID NO: 831; b. CDR-L2, comprising the amino acid sequence SEQ ID NO: 1373; and c. CDR-L3, comprising the amino acid sequence SEQ ID NO: 1915.

[0969] In one aspect, an antibody or antigen-binding fragment thereof is provided, wherein the antibody or antigen-binding fragment thereof comprises a VH as in any of the embodiments provided above, and a VL as in any of the embodiments provided above. In some embodiments, the antibody or antigen-binding fragment thereof comprises the VH amino acid sequence of SEQ ID NO: 18, and the VL amino acid sequence of SEQ ID NO: 289, optionally including post-translational modifications of those sequences.

### TBRE1006

[0970] In one aspect, the present disclosure provides an antibody or antigen-binding fragment thereof comprising at least one or both variable regions selected from: a. VH comprising the amino acid sequence of SEQ ID NO: 19 and b. VL comprising the amino acid sequence of SEQ ID NO: 290.

[0971] In one aspect, the present disclosure provides an antibody or antigen-binding fragment thereof comprising at least one, two, three, four, five, or six CDRs selected from: a. CDR-H1 comprising the amino acid sequence of SEQ ID NO: 561; b. CDR-H2 comprising the amino acid sequence of SEQ ID NO: 1103; c. CDR-H3 comprising the amino acid sequence of SEQ ID NO: 1645; d. CDR-L1 comprising the amino acid sequence of SEQ ID NO: 832; e. CDR-L2 comprising the amino acid sequence of SEQ ID NO: 1374; and f. CDR-L3 comprising the amino acid sequence of SEQ ID NO: 1916.

[0972] In one aspect, the present disclosure provides an antibody or antigen-binding fragment thereof comprising: a. CDR-H1 comprising the amino acid sequence of SEQ ID NO: 561; b. CDR-H2 comprising the amino acid sequence of SEQ ID NO: 1103; c. CDR-H3 comprising the amino acid sequence of SEQ ID NO: 1645; d. CDR-L1 comprising the amino acid sequence of SEQ ID NO: 832; e. CDR-L2 comprising the amino acid sequence of SEQ ID NO: 1374; and f. CDR-L3 comprising the amino acid sequence of SEQ ID NO: 1916. In one aspect, the present disclosure provides an antibody or antigen-binding fragment thereof comprising a CDR-H3 comprising the amino acid sequence of SEQ ID NO: 1645; and a CDR-L3 comprising the amino acid sequence of SEQ ID NO: 1916.

[0973] In one aspect, the present disclosure provides an antibody or antigen-binding fragment thereof comprising at least one, at least two, or all three VH CDR sequences selected from: a. CDR-H1 comprising the amino acid sequence of SEQ ID NO: 561; b. CDR-H2 comprising the amino acid sequence of SEQ ID NO: 1103; c. CDR-H3 comprising the amino acid sequence of SEQ ID NO: 1645; and a VL comprising the amino acid sequence of SEQ ID NO: 290.

[0974] In one aspect, the present disclosure provides an antibody or antigen-binding fragment thereof comprising at least one, at least two, or all three VL CDR sequences selected from: a. CDR-L1 comprising the amino acid sequence of SEQ ID NO: 832; c. CDR-L2 comprising the amino acid sequence of SEQ ID NO: 1374; b. CDR-L3 comprising the amino acid sequence of SEQ ID NO: 1916, and a VH comprising the amino acid sequence of SEQ ID NO: 19.

[0975] In one aspect, an antibody or antigen-binding fragment thereof is provided, wherein the antibody or antigen-binding fragment thereof comprises a heavy chain variable domain (VH) having at least 90%, 91%, 92%, 93%, 94%, 95%, 96%, 97%, 98%, 99%, or 100% sequence identity to the amino acid sequence SEQ ID NO: 19. In some embodiments, a VH sequence having at least 90%, 91%, 92%, 93%, 94%, 95%, 96%, 97%, 98%, or 99% identity contains substitutions (e.g., conservative substitutions), insertions, or deletions relative to the reference sequence, but an antibody or antigen-binding fragment thereof comprising that sequence retains the ability to bind to same antigen as of the parent (e.g., cancer associated antigen). In some embodiments, a total of 1 to 10 amino acids have been substituted, inserted and/or deleted in the amino acid sequence SEQ ID NO: 19. In some embodiments, substitutions, insertions, or deletions occur in regions outside the CDRs (e.g., in the FRs). Optionally, the antibody or antigen-binding fragment thereof comprises the VH sequence SEQ ID NO: 19, including one or more post-translational modifications of that sequence. In a particular embodiment, the VH comprises one, two or three CDRs selected from: a. CDR-H1, comprising the amino acid sequence SEQ ID NO: 561; b. CDR-H2, comprising the amino acid sequence SEQ ID NO: 1103; and c. CDR-H3, comprising the amino acid sequence SEQ ID NO: 1645.

[0976] In one aspect, an antibody or antigen-binding fragment thereof is provided, wherein the antibody or antigen-binding fragment thereof comprises a light chain variable domain (VL) having at least 90%, 91%, 92%, 93%, 94%, 95%, 96%, 97%, 98%, 99%, or 100% sequence identity to the amino acid sequence SEQ ID NO: 290. In some embodiments, a VL sequence having at least 90%, 91%, 92%, 93%, 94%, 95%, 96%, 97%, 98%, or 99% identity contains substitutions (e.g., conservative substitutions), insertions, or deletions relative to the reference sequence, but an antibody or antigen-binding fragment thereof comprising that sequence retains the ability to bind to same antigen as the parent (e.g., cancer associated antigen). In some embodiments, a total of 1 to 10 amino acids have been substituted, inserted and/or deleted in the amino acid sequence SEQ ID NO: 290. In some embodiments, the substitutions, insertions, or deletions occur in regions outside the CDRs (e.g., in the FRs). Optionally, the antibody or antigen-binding fragment thereof comprises the VL sequence SEQ ID NO: 290, including one or more post-translational modifications of that sequence. In a particular embodiment, the VL comprises one, two or three CDRs selected from: a. CDR-L1, comprising the amino acid sequence SEQ ID NO: 832; b. CDR-L2, comprising the amino acid sequence SEQ ID NO: 1374; and c. CDR-L3, comprising the amino acid sequence SEQ ID NO: 1916.

[0977] In one aspect, an antibody or antigen-binding fragment thereof is provided, wherein the antibody or antigen-binding fragment thereof comprises a VH as in any of the embodiments provided above, and a VL as in any of the embodiments provided above. In some embodiments, the antibody or antigen-binding fragment thereof comprises the VH amino acid sequence of SEQ ID NO: 19, and the VL amino acid sequence of SEQ ID NO: 290, optionally including post-translational modifications of those sequences.

[0978] TBRE1007

[0979] In one aspect, the present disclosure provides an antibody or antigen-binding fragment thereof comprising at least one or both variable regions selected from: a. VH comprising the amino acid sequence of SEQ ID NO: 20 and b. VL comprising the amino acid sequence of SEQ ID NO: 291.

[0980] In one aspect, the present disclosure provides an antibody or antigen-binding fragment thereof comprising at least one, two, three, four, five, or six CDRs selected from: a. CDR-H1 comprising the amino acid sequence of SEQ ID NO: 562; b. CDR-H2 comprising the amino acid sequence of SEQ ID NO: 1104; c. CDR-H3 comprising the amino acid sequence of SEQ ID NO: 1646; d. CDR-L1 comprising the amino acid sequence of SEQ ID NO: 833; e. CDR-L2 comprising the amino acid sequence of SEQ ID NO: 1375; and f. CDR-L3 comprising the amino acid sequence of SEQ ID NO: 1917.

[0981] In one aspect, the present disclosure provides an antibody or antigen-binding fragment thereof comprising: a. CDR-H1 comprising the amino acid sequence of SEQ ID NO: 562; b. CDR-H2 comprising the amino acid sequence of SEQ ID NO: 1104; c. CDR-H3 comprising the amino acid sequence of SEQ ID NO: 1646; d. CDR-L1 comprising the amino acid sequence of SEQ ID NO: 833; e. CDR-L2 comprising the amino acid sequence of SEQ ID NO: 1375; and f. CDR-L3 comprising the amino acid sequence of SEQ ID NO: 1917. In one aspect, the present disclosure provides an antibody or antigen-binding fragment thereof comprising a CDR-H3 comprising the amino acid sequence of SEQ ID NO: 1646; and a CDR-L3 comprising the amino acid sequence of SEQ ID NO: 1917.

[0982] In one aspect, the present disclosure provides an antibody or antigen-binding fragment thereof comprising at least one, at least two, or all three VH CDR sequences selected from: a. CDR-H1 comprising the amino acid sequence of SEQ ID NO: 562; b. CDR-H2 comprising the amino acid sequence of SEQ ID NO: 1104; c. CDR-H3 comprising the amino acid sequence of SEQ ID NO: 1646; and a VL comprising the amino acid sequence of SEQ ID NO: 291.

[0983] In one aspect, the present disclosure provides an antibody or antigen-binding fragment thereof comprising at least one, at least two, or all three VL CDR sequences selected from: a. CDR-L1 comprising the amino acid sequence of SEQ ID NO: 833; b. CDR-L2 comprising the amino acid sequence of SEQ ID NO: 1375; c. CDR-L3 comprising the amino acid sequence of SEQ ID NO: 1917; and a VH comprising the amino acid sequence of SEQ ID NO: 20.

[0984] In one aspect, an antibody or antigen-binding fragment thereof is provided, wherein the antibody or antigen-binding fragment thereof comprises a heavy chain variable domain (VH) having at least 90%, 91%, 92%, 93%, 94%, 95%, 96%, 97%, 98%, 99%, or 100% sequence identity to the amino acid sequence SEQ ID NO: 20. In some embodiments, a VH sequence having at least 90%, 91%, 92%, 93%, 94%, 95%, 96%, 97%, 98%, or 99% identity contains substitutions (e.g., conservative substitutions), insertions, or deletions relative to the reference sequence, but an antibody or antigen-binding fragment thereof comprising that sequence retains the ability to bind to same antigen as of the parent (e.g., cancer associated antigen). In some embodiments, a total of 1 to 10 amino acids have been substituted, inserted and/or deleted in the amino acid sequence SEQ ID NO: 20. In some embodiments, substitutions, insertions, or deletions occur in regions outside the CDRs (e.g., in the FRs). Optionally, the antibody or antigen-binding fragment thereof comprises the VH sequence SEQ ID NO: 20, including one or more post-translational modifications of that sequence. In a particular embodiment, the VH comprises one, two or three CDRs selected from: a. CDR-H1, comprising the amino acid sequence SEQ ID NO: 562; b. CDR-H2, comprising the amino acid sequence SEQ ID NO: 1104; and c. CDR-H3, comprising the amino acid sequence SEQ ID NO: 1646.

[0985] In one aspect, an antibody or antigen-binding fragment thereof is provided, wherein the antibody or antigen-binding fragment thereof comprises a light chain variable domain (VL) having at least 90%, 91%, 92%, 93%, 94%, 95%, 96%, 97%, 98%, 99%, or 100% sequence identity to the amino acid sequence SEQ ID NO: 291. In some embodiments, a VL sequence having at least 90%, 91%, 92%, 93%, 94%, 95%, 96%, 97%, 98%, or 99% identity contains substitutions (e.g., conservative substitutions), insertions, or deletions relative to the reference sequence, but an antibody or antigen-binding fragment thereof comprising that sequence retains the ability to bind to same antigen as the parent (e.g., cancer associated antigen). In some embodiments, a total of 1 to 10 amino acids have been substituted, inserted and/or deleted in the amino acid sequence SEQ ID NO: 291. In some embodiments, the substitutions, insertions, or deletions occur in regions outside the CDRs (e.g., in the FRs). Optionally, the antibody or antigen-binding fragment thereof comprises the VL sequence SEQ ID NO: 291, including one or more post-translational modifications of that sequence. In a particular embodiment, the VL comprises one, two or three CDRs selected from: a. CDR-L1, comprising the amino acid sequence SEQ ID NO: 833; b. CDR-L2, comprising the amino acid sequence SEQ ID NO: 1375; and c. CDR-L3, comprising the amino acid sequence SEQ ID NO: 1917.

[0986] In one aspect, an antibody or antigen-binding fragment thereof is provided, wherein the antibody or antigen-binding fragment thereof comprises a VH as in any of the embodiments provided above, and a VL as in any of the embodiments provided above. In some embodiments, the antibody or antigen-binding fragment thereof comprises the VH amino acid sequence of SEQ ID NO: 20, and the VL amino acid sequence of SEQ ID NO: 291, optionally including post-translational modifications of those sequences.

### TBRE1008

[0987] In one aspect, the present disclosure provides an antibody or antigen-binding fragment thereof comprising at least one or both variable regions selected from: a. VH comprising the amino acid sequence of SEQ ID NO: 21 and b. VL comprising the amino acid sequence of SEQ ID NO: 292.

[0988] In one aspect, the present disclosure provides an antibody or antigen-binding fragment thereof comprising at least one, two, three, four, five, or six CDRs selected from: a. CDR-H1 comprising the amino acid sequence of SEQ ID NO: 563; b. CDR-H2 comprising the amino acid sequence of SEQ ID NO: 1105; c. CDR-H3 comprising the amino acid sequence of SEQ ID NO: 1647; d. CDR-L1 comprising the amino acid sequence of SEQ ID NO: 834; e. CDR-L2 comprising the amino acid sequence of SEQ ID NO: 1376; and f. CDR-L3 comprising the amino acid sequence of SEQ ID NO: 1918.

[0989] In one aspect, the present disclosure provides an antibody or antigen-binding fragment thereof comprising: a. CDR-H1 comprising the amino acid sequence of SEQ ID NO: 563; b. CDR-H2 comprising the amino acid sequence of SEQ ID NO: 1105; c. CDR-H3 comprising the amino acid sequence of SEQ ID NO: 1647; d. CDR-L1 comprising the amino acid sequence of SEQ ID NO: 834; e. CDR-L2 comprising the amino acid sequence of SEQ ID NO: 1376; and f. CDR-L3 comprising the amino acid sequence of SEQ ID NO: 1918. In one aspect, the present disclosure provides an antibody or antigen-binding fragment thereof comprising a CDR-H3 comprising the amino acid sequence of SEQ ID NO: 1647; and a CDR-L3 comprising the amino acid sequence of SEQ ID NO: 1918.

[0990] In one aspect, the present disclosure provides an antibody or antigen-binding fragment thereof comprising at least one, at least two, or all three VH CDR sequences selected from: a. CDR-H1 comprising the amino acid sequence of SEQ ID NO: 563; b. CDR-H2 comprising the amino acid sequence of SEQ ID NO: 1105; c. CDR-H3 comprising the amino acid sequence of SEQ ID NO: 1647; and a VL comprising the amino acid sequence of SEQ ID NO: 292.

[0991] In one aspect, the present disclosure provides an antibody or antigen-binding fragment thereof comprising at least one, at least two, or all three VL CDR sequences selected from: a. CDR-L1 comprising the amino acid sequence of SEQ ID NO: 834; b. CDR-L2 comprising the amino acid sequence of SEQ ID NO: 1376; c. CDR-L3 comprising the amino acid sequence of SEQ ID NO: 1918; and a VH comprising the amino acid sequence of SEQ ID NO: 21.

[0992] In one aspect, an antibody or antigen-binding fragment thereof is provided, wherein the antibody or antigen-binding fragment thereof comprises a heavy chain variable domain (VH) having at least 90%, 91%, 92%, 93%, 94%, 95%, 96%, 97%, 98%, 99%, or 100% sequence identity to the amino acid sequence SEQ ID NO: 21. In some embodiments, a VH sequence having at least 90%, 91%, 92%, 93%, 94%, 95%, 96%, 97%, 98%, or 99% identity contains substitutions (e.g., conservative substitutions), insertions, or deletions relative to the reference sequence, but an antibody or antigen-binding fragment thereof comprising that sequence retains the ability to bind to same antigen as of the parent (e.g., cancer associated antigen). In some embodiments, a total of 1 to 10 amino acids have been substituted, inserted and/or deleted in the amino acid sequence SEQ ID NO: 21. In some embodiments, substitutions, insertions, or deletions occur in regions outside the CDRs (e.g., in the FRs). Optionally, the antibody or antigen-binding fragment thereof comprises the VH sequence SEQ ID NO: 21, including one or more post-translational modifications of that sequence. In a particular embodiment, the VH comprises one, two or three CDRs selected from: a. CDR-H1, comprising the amino acid sequence SEQ ID NO: 563; b. CDR-H2, comprising the amino acid sequence SEQ ID NO: 1105; and c. CDR-H3, comprising the amino acid sequence SEQ ID NO: 1647.

[0993] In one aspect, an antibody or antigen-binding fragment thereof is provided, wherein the antibody or antigen-binding fragment thereof comprises a light chain variable domain (VL) having at least 90%, 91%, 92%, 93%, 94%, 95%, 96%, 97%, 98%, 99%, or 100% sequence identity to the amino acid sequence SEQ ID NO: 292. In some embodiments, a VL sequence having at least 90%, 91%, 92%, 93%, 94%, 95%, 96%, 97%, 98%, or 99% identity contains substitutions (e.g., conservative substitutions), insertions, or deletions relative to the reference sequence, but an antibody or antigen-binding fragment thereof comprising that sequence retains the ability to bind to same antigen as the parent (e.g., cancer associated antigen). In some embodiments, a total of 1 to 10 amino acids have been substituted, inserted and/or deleted in the amino acid sequence SEQ ID NO: 292. In some embodiments, the substitutions, insertions, or deletions occur in regions outside the CDRs (e.g., in the FRs). Optionally, the antibody or antigen-binding fragment thereof comprises the VL sequence SEQ ID NO: 292, including one or more post-translational modifications of that sequence. In a particular embodiment, the VL comprises one, two or three CDRs selected from: a. CDR-L1, comprising the amino acid sequence SEQ ID NO: 834; b. CDR-L2, comprising the amino acid sequence SEQ ID NO: 1376; and c. CDR-L3, comprising the amino acid sequence SEQ ID NO: 1918.

[0994] In one aspect, an antibody or antigen-binding fragment thereof is provided, wherein the antibody or antigen-binding fragment thereof comprises a VH as in any of the embodiments provided above, and a VL as in any of the embodiments provided above. In some embodiments, the antibody or antigen-binding fragment thereof comprises the VH amino acid sequence of SEQ ID NO: 21, and the VL amino acid sequence of SEQ ID NO: 292, optionally including post-translational modifications of those sequences.

### TBRE1009

[0995] In one aspect, the present disclosure provides an antibody or antigen-binding fragment thereof comprising at least one or both variable regions selected from: a. VH comprising the amino acid sequence of SEQ ID NO: 22 and b. VL comprising the amino acid sequence of SEQ ID NO: 293.

[0996] In one aspect, the present disclosure provides an antibody or antigen-binding fragment thereof comprising at least one, two, three, four, five, or six CDRs selected from: a. CDR-H1 comprising the amino acid sequence of SEQ ID NO: 564; b. CDR-H2 comprising the amino acid sequence of SEQ ID NO: 1106; c. CDR-H3 comprising the amino acid sequence of SEQ ID NO: 1648; d. CDR-L1 comprising the amino acid sequence of SEQ ID NO: 835; e. CDR-L2 comprising the amino acid sequence of SEQ ID NO: 1377; and f. CDR-L3 comprising the amino acid sequence of SEQ ID NO: 1919.

[0997] In one aspect, the present disclosure provides an antibody or antigen-binding fragment thereof comprising: a. CDR-H1 comprising the amino acid sequence of SEQ ID NO: 564; b. CDR-H2 comprising the amino acid sequence of SEQ ID NO: 1106; c. CDR-H3 comprising the amino acid sequence of SEQ ID NO: 1648; d. CDR-L1 comprising the amino acid sequence of SEQ ID NO: 835; e. CDR-L2 comprising the amino acid sequence of SEQ ID NO: 1377; and f. CDR-L3 comprising the amino acid sequence of SEQ ID NO: 1919. In one aspect, the present disclosure provides an antibody or antigen-binding fragment thereof comprising a CDR-H3 comprising the amino acid sequence of SEQ ID NO: 1648; and a CDR-L3 comprising the amino acid sequence of SEQ ID NO: 1919.

[0998] In one aspect, the present disclosure provides an antibody or antigen-binding fragment thereof comprising at least one, at least two, or all three VH CDR sequences selected from: a. CDR-H1 comprising the amino acid sequence of SEQ ID NO: 564; b. CDR-H2 comprising the amino acid sequence of SEQ ID NO: 1106; c. CDR-H3 comprising the amino acid sequence of SEQ ID NO: 1648; and a VL comprising the amino acid sequence of SEQ ID NO: 293.

[0999] In one aspect, the present disclosure provides an antibody or antigen-binding fragment thereof comprising at least one, at least two, or all three VL CDR sequences selected from: a. CDR-L1 comprising the amino acid sequence of SEQ ID NO: 835; b. CDR-L2 comprising the amino acid sequence of SEQ ID NO: 1377; c. CDR-L3 comprising the amino acid sequence of SEQ ID NO: 1919; and a VH comprising the amino acid sequence of SEQ ID NO: 22.

[1000] In one aspect, an antibody or antigen-binding fragment thereof is provided, wherein the antibody or antigen-binding fragment thereof comprises a heavy chain variable domain (VH) having at least 90%, 91%, 92%, 93%, 94%, 95%, 96%, 97%, 98%, 99%, or 100% sequence identity to the amino acid sequence SEQ ID NO: 22. In some embodiments, a VH sequence having at least 90%, 91%, 92%, 93%, 94%, 95%, 96%, 97%, 98%, or 99% identity contains substitutions (e.g., conservative substitutions), insertions, or deletions relative to the reference sequence, but an antibody or antigen-binding fragment thereof comprising that sequence retains the ability to bind to same antigen as of the parent (e.g., cancer associated antigen). In some embodiments, a total of 1 to 10 amino acids have been substituted, inserted and/or deleted in the amino acid sequence SEQ ID NO: 22. In some embodiments, substitutions, insertions, or deletions occur in regions outside the CDRs (e.g., in the FRs). Optionally, the antibody or antigen-binding fragment thereof comprises the VH sequence SEQ ID NO: 22, including one or more post-translational modifications of that sequence. In a particular embodiment, the VH comprises one, two or three CDRs selected from: a. CDR-H1, comprising the amino acid sequence SEQ ID NO: 564; b. CDR-H2, comprising the amino acid sequence SEQ ID NO: 1106; and c. CDR-H3, comprising the amino acid sequence SEQ ID NO: 1648.

[1001] In one aspect, an antibody or antigen-binding fragment thereof is provided, wherein the antibody or antigen-binding fragment thereof comprises a light chain variable domain (VL) having at least 90%, 91%, 92%, 93%, 94%, 95%, 96%, 97%, 98%, 99%, or 100% sequence identity to the amino acid sequence SEQ ID NO: 293. In some embodiments, a VL sequence having at least 90%, 91%, 92%, 93%, 94%, 95%, 96%, 97%, 98%, or 99% identity contains substitutions (e.g., conservative substitutions), insertions, or deletions relative to the reference sequence, but an antibody or antigen-binding fragment thereof comprising that sequence retains the ability to bind to same antigen as the parent (e.g., cancer associated antigen). In some embodiments, a total of 1 to 10 amino acids have been substituted, inserted and/or deleted in the amino acid sequence SEQ ID NO: 293. In some embodiments, the substitutions, insertions, or deletions occur in regions outside the CDRs (e.g., in the FRs). Optionally, the antibody or antigen-binding fragment thereof comprises the VL sequence SEQ ID NO: 293, including one or more post-translational modifications of that sequence. In a particular embodiment, the VL comprises one, two or three CDRs selected from: a. CDR-L1, comprising the amino acid sequence SEQ ID NO: 835; b. CDR-L2, comprising the amino acid sequence SEQ ID NO: 1377; and c. CDR-L3, comprising the amino acid sequence SEQ ID NO: 1919.

[1002] In one aspect, an antibody or antigen-binding fragment thereof is provided, wherein the antibody or antigen-binding fragment thereof comprises a VH as in any of the embodiments provided above, and a VL as in any of the embodiments provided above. In some embodiments, the antibody or antigen-binding fragment thereof comprises the VH amino acid sequence of SEQ ID NO: 22, and the VL amino acid sequence of SEQ ID NO: 293, optionally including post-translational modifications of those sequences.

### TBRE1010

[1003] In one aspect, the present disclosure provides an antibody or antigen-binding fragment thereof comprising at least one or both variable regions selected from: a. VH comprising the amino acid sequence of SEQ ID NO: 23 and b. VL comprising the amino acid sequence of SEQ ID NO: 294.

[1004] In one aspect, the present disclosure provides an antibody or antigen-binding fragment thereof comprising at least one, two, three, four, five, or six CDRs selected from: a. CDR-H1 comprising the amino acid sequence of SEQ ID NO: 565; b. CDR-H2 comprising the amino acid sequence of SEQ ID NO: 1107; c. CDR-H3 comprising the amino acid sequence of SEQ ID NO: 1649; d. CDR-L1 comprising the amino acid sequence of SEQ ID NO: 836; e. CDR-L2 comprising the amino acid sequence of SEQ ID NO: 1378; and f. CDR-L3 comprising the amino acid sequence of SEQ ID NO: 1920.

[1005] In one aspect, the present disclosure provides an antibody or antigen-binding fragment thereof comprising: a. CDR-H1 comprising the amino acid sequence of SEQ ID NO: 565; b. CDR-H2 comprising the amino acid sequence of SEQ ID NO: 1107; c. CDR-H3 comprising the amino acid sequence of SEQ ID NO: 1649; d. CDR-L1 comprising the amino acid sequence of SEQ ID NO: 836; e. CDR-L2 comprising the amino acid sequence of SEQ ID NO: 1378; and f. CDR-L3 comprising the amino acid sequence of SEQ ID NO: 1920. In one aspect, the present disclosure provides an antibody or antigen-binding fragment thereof comprising a CDR-H3 comprising the amino acid sequence of SEQ ID NO: 1649; and a CDR-L3 comprising the amino acid sequence of SEQ ID NO: 1920.

[1006] In one aspect, the present disclosure provides an antibody or antigen-binding fragment thereof comprising at least one, at least two, or all three VH CDR sequences selected from: a. CDR-H1 comprising the amino acid sequence of SEQ ID NO: 565; b. CDR-H2 comprising the amino acid sequence of SEQ ID NO: 1107; c. CDR-H3 comprising the amino acid sequence of SEQ ID NO: 1649; and a VL comprising the amino acid sequence of SEQ ID NO: 294.

[1007] In one aspect, the present disclosure provides an antibody or antigen-binding fragment thereof comprising at least one, at least two, or all three VL CDR sequences selected from: a. CDR-L1 comprising the amino acid sequence of SEQ ID NO: 836; b. CDR-L2 comprising the amino acid sequence of SEQ ID NO: 1378; c. CDR-L3 comprising the amino acid sequence of SEQ ID NO: 1920; and a VH comprising the amino acid sequence of SEQ ID NO: 23.

[1008] In one aspect, an antibody or antigen-binding fragment thereof is provided, wherein the antibody or antigen-binding fragment thereof comprises a heavy chain variable domain (VH) having at least 90%, 91%, 92%, 93%, 94%, 95%, 96%, 97%, 98%, 99%, or 100% sequence identity to the amino acid sequence SEQ ID NO: 23. In some embodiments, a VH sequence having at least 90%, 91%, 92%, 93%, 94%, 95%, 96%, 97%, 98%, or 99% identity contains substitutions (e.g., conservative substitutions), insertions, or deletions relative to the reference sequence, but an antibody or antigen-binding fragment thereof comprising that sequence retains the ability to bind to same antigen as of the parent (e.g., cancer associated antigen). In some embodiments, a total of 1 to 10 amino acids have been substituted, inserted and/or deleted in the amino acid sequence SEQ ID NO: 23. In some embodiments, substitutions, insertions, or deletions occur in regions outside the CDRs (e.g., in the FRs). Optionally, the antibody or antigen-binding fragment thereof comprises the VH sequence SEQ ID NO: 23, including one or more post-translational modifications of that sequence. In a particular embodiment, the VH comprises one, two or three CDRs selected from: a. CDR-H1, comprising the amino acid sequence SEQ ID NO: 565; b. CDR-H2, comprising the amino acid sequence SEQ ID NO: 1107; and a. CDR-H3, comprising the amino acid sequence SEQ ID NO: 1649.

[1009] In one aspect, an antibody or antigen-binding fragment thereof is provided, wherein the antibody or antigen-binding fragment thereof comprises a light chain variable domain (VL) having at least 90%, 91%, 92%, 93%, 94%, 95%, 96%, 97%, 98%, 99%, or 100% sequence identity to the amino acid sequence SEQ ID NO: 294. In some embodiments, a VL sequence having at least 90%, 91%, 92%, 93%, 94%, 95%, 96%, 97%, 98%, or 99% identity contains substitutions (e.g., conservative substitutions), insertions, or deletions relative to the reference sequence, but an antibody or antigen-binding fragment thereof comprising that sequence retains the ability to bind to same antigen as the parent (e.g., cancer associated antigen). In some embodiments, a total of 1 to 10 amino acids have been substituted, inserted and/or deleted in the amino acid sequence SEQ ID NO: 294. In some embodiments, the substitutions, insertions, or deletions occur in regions outside the CDRs (e.g., in the FRs). Optionally, the antibody or antigen-binding fragment thereof comprises the VL sequence SEQ ID NO: 294, including one or more post-translational modifications of that sequence. In a particular embodiment, the VL comprises one, two or three CDRs selected from: a. CDR-L1, comprising the amino acid sequence SEQ ID NO: 836; b. CDR-L2, comprising the amino acid sequence SEQ ID NO: 1378; and a. CDR-L3, comprising the amino acid sequence SEQ ID NO: 1920.

[1010] In one aspect, an antibody or antigen-binding fragment thereof is provided, wherein the antibody or antigen-binding fragment thereof comprises a VH as in any of the embodiments provided above, and a VL as in any of the embodiments provided above. In some embodiments, the antibody or antigen-binding fragment thereof comprises the VH amino acid sequence of SEQ ID NO: 23, and the VL amino acid sequence of SEQ ID NO: 294, optionally including post-translational modifications of those sequences.

### TBRE1011

[1011] In one aspect, the present disclosure provides an antibody or antigen-binding fragment thereof comprising at least one or both variable regions selected from: a. VH comprising the amino acid sequence of SEQ ID NO: 24 and a. VL comprising the amino acid sequence of SEQ ID NO: 295.

[1012] In one aspect, the present disclosure provides an antibody or antigen-binding fragment thereof comprising at least one, two, three, four, five, or six CDRs selected from: a. CDR-H1 comprising the amino acid sequence of SEQ ID NO: 566, b. CDR-H2 comprising the amino acid sequence of SEQ ID NO: 1108, c. CDR-H3 comprising the amino acid sequence of SEQ ID NO: 1650, d. CDR-L1 comprising the amino acid sequence of SEQ ID NO: 837, e. CDR-L2 comprising the amino acid sequence of SEQ ID NO: 1379, and f. CDR-L3 comprising the amino acid sequence of SEQ ID NO: 1921.

[1013] In one aspect, the present disclosure provides an antibody or antigen-binding fragment thereof comprising: a. CDR-H1 comprising the amino acid sequence of SEQ ID NO: 566, b. CDR-H2 comprising the amino acid sequence of SEQ ID NO: 1108, c. CDR-H3 comprising the amino acid sequence of SEQ ID NO: 1650, d. CDR-L1 comprising the amino acid sequence of SEQ ID NO: 837, e. CDR-L2 comprising the amino acid sequence of SEQ ID NO: 1379, and f. CDR-L3 comprising the amino acid sequence of SEQ ID NO: 1921. In one aspect, the present disclosure provides an antibody or antigen-binding fragment thereof comprising a CDR-H3 comprising the amino acid sequence of SEQ ID NO: 1650, and a CDR-L3 comprising the amino acid sequence of SEQ ID NO: 1921.

[1014] In one aspect, the present disclosure provides an antibody or antigen-binding fragment thereof comprising at least one, at least two, or all three VH CDR sequences selected from: a. CDR-H1 comprising the amino acid sequence of SEQ ID NO: 566, b. CDR-H2 comprising the amino acid sequence of SEQ ID NO: 1108, c. CDR-H3 comprising the amino acid sequence of SEQ ID NO: 1650, and a VL comprising the amino acid sequence of SEQ ID NO: 295.

[1015] In one aspect, the present disclosure provides an antibody or antigen-binding fragment thereof comprising at least one, at least two, or all three VL CDR sequences selected from: a. CDR-L1 comprising the amino acid sequence of SEQ ID NO: 837, b. CDR-L2 comprising the amino acid sequence of SEQ ID NO: 1379, c. CDR-L3 comprising the amino acid sequence of SEQ ID NO: 1921, and a VH comprising the amino acid sequence of SEQ ID NO: 24.

[1016] In one aspect, an antibody or antigen-binding fragment thereof is provided, wherein the antibody or antigen-binding fragment thereof comprises a heavy chain variable domain (VH) having at least 90%, 91%, 92%, 93%, 94%, 95%, 96%, 97%, 98%, 99%, or 100% sequence identity to the amino acid sequence SEQ ID NO: 24. In some embodiments, a VH sequence having at least 90%, 91%, 92%, 93%, 94%, 95%, 96%, 97%, 98%, or 99% identity contains substitutions (e.g., conservative substitutions), insertions, or deletions relative to the reference sequence, but an antibody or antigen-binding fragment thereof comprising that sequence retains the ability to bind to same antigen as of the parent (e.g., cancer associated antigen). In some embodiments, a total of 1 to 10 amino acids have been substituted, inserted and/or deleted in the amino acid sequence SEQ ID NO: 24. In some embodiments, substitutions, insertions, or deletions occur in regions outside the CDRs (e.g., in the FRs). Optionally, the antibody or antigen-binding fragment thereof comprises the VH sequence SEQ ID NO: 24, including one or more post-translational modifications of that sequence. In a particular embodiment, the VH comprises one, two or three CDRs selected from: a. CDR-H1, comprising the amino acid sequence SEQ ID NO: 566, b. CDR-H2, comprising the amino acid sequence SEQ ID NO: 1108, and c. CDR-H3, comprising the amino acid sequence SEQ ID NO: 1650.

[1017] In one aspect, an antibody or antigen-binding fragment thereof is provided, wherein the antibody or antigen-binding fragment thereof comprises a light chain variable domain (VL) having at least 90%, 91%, 92%, 93%, 94%, 95%, 96%, 97%, 98%, 99%, or 100% sequence identity to the amino acid sequence SEQ ID NO: 295. In some embodiments, a VL sequence having at least 90%, 91%, 92%, 93%, 94%, 95%, 96%, 97%, 98%, or 99% identity contains substitutions (e.g., conservative substitutions), insertions, or deletions relative to the reference sequence, but an antibody or antigen-binding fragment thereof comprising that sequence retains the ability to bind to same antigen as the parent (e.g., cancer associated antigen). In some embodiments, a total of 1 to 10 amino acids have been substituted, inserted and/or deleted in the amino acid sequence SEQ ID NO: 295. In some embodiments, the substitutions, insertions, or deletions occur in regions outside the CDRs (e.g., in the FRs). Optionally, the antibody or antigen-binding fragment thereof comprises the VL sequence SEQ ID NO: 295, including one or more post-translational modifications of that sequence. In a particular embodiment, the VL comprises one, two or three CDRs selected from: a. CDR-L1, comprising the amino acid sequence SEQ ID NO: 837, b. CDR-L2, comprising the amino acid sequence SEQ ID NO: 1379, and c. CDR-L3, comprising the amino acid sequence SEQ ID NO: 1921.

[1018] In one aspect, an antibody or antigen-binding fragment thereof is provided, wherein the antibody or antigen-binding fragment thereof comprises a VH as in any of the embodiments provided above, and a VL as in any of the embodiments provided above. In some embodiments, the antibody or antigen-binding fragment thereof comprises the VH amino acid sequence of SEQ ID NO: 24, and the VL amino acid sequence of SEQ ID NO: 295, optionally including post-translational modifications of those sequences.

### TBRE1012

[1019] In one aspect, the present disclosure provides an antibody or antigen-binding fragment thereof comprising at least one or both variable regions selected from: a. VH comprising the amino acid sequence of SEQ ID NO: 25 and b. VL comprising the amino acid sequence of SEQ ID NO: 296.

[1020] In one aspect, the present disclosure provides an antibody or antigen-binding fragment thereof comprising at least one, two, three, four, five, or six CDRs selected from: a. CDR-H1 comprising the amino acid sequence of SEQ ID NO: 567, b. CDR-H2 comprising the amino acid sequence of SEQ ID NO: 1109, c. CDR-H3 comprising the amino acid sequence of SEQ ID NO: 1651, d. CDR-L1 comprising the amino acid sequence of SEQ ID NO: 838, e. CDR-L2 comprising the amino acid sequence of SEQ ID NO: 1380, and f. CDR-L3 comprising the amino acid sequence of SEQ ID NO: 1922.

[1021] In one aspect, the present disclosure provides an antibody or antigen-binding fragment thereof comprising: a. CDR-H1 comprising the amino acid sequence of SEQ ID NO: 567, b. CDR-H2 comprising the amino acid sequence of SEQ ID NO: 1109, c. CDR-H3 comprising the amino acid sequence of SEQ ID NO: 1651, d. CDR-L1 comprising the amino acid sequence of SEQ ID NO: 838, e. CDR-L2 comprising the amino acid sequence of SEQ ID NO: 1380, and f. CDR-L3 comprising the amino acid sequence of SEQ ID NO: 1922. In one aspect, the present disclosure provides an antibody or antigen-binding fragment thereof comprising a CDR-H3 comprising the amino acid sequence of SEQ ID NO: 1651, and a CDR-L3 comprising the amino acid sequence of SEQ ID NO: 1922.

[1022] In one aspect, the present disclosure provides an antibody or antigen-binding fragment thereof comprising at least one, at least two, or all three VH CDR sequences selected from: a. CDR-H1 comprising the amino acid sequence of SEQ ID NO: 567, b. CDR-H2 comprising the amino acid sequence of SEQ ID NO: 1109, c. CDR-H3 comprising the amino acid sequence of SEQ ID NO: 1651, and a VL comprising the amino acid sequence of SEQ ID NO: 296.

[1023] In one aspect, the present disclosure provides an antibody or antigen-binding fragment thereof comprising at least one, at least two, or all three VL CDR sequences selected from: a. CDR-L1 comprising the amino acid sequence of SEQ ID NO: 838, b. CDR-L2 comprising the amino acid sequence of SEQ ID NO: 1380, c. CDR-L3 comprising the amino acid sequence of SEQ ID NO: 1922, and a VH comprising the amino acid sequence of SEQ ID NO: 25.

[1024] In one aspect, an antibody or antigen-binding fragment thereof is provided, wherein the antibody or antigen-binding fragment thereof comprises a heavy chain variable domain (VH) having at least 90%, 91%, 92%, 93%, 94%, 95%, 96%, 97%, 98%, 99%, or 100% sequence identity to the amino acid sequence SEQ ID NO: 25. In some embodiments, a VH sequence having at least 90%, 91%, 92%, 93%, 94%, 95%, 96%, 97%, 98%, or 99% identity contains substitutions (e.g., conservative substitutions), insertions, or deletions relative to the reference sequence, but an antibody or antigen-binding fragment thereof comprising that sequence retains the ability to bind to same antigen as of the parent (e.g., cancer associated antigen). In some embodiments, a total of 1 to 10 amino acids have been substituted, inserted and/or deleted in the amino acid sequence SEQ ID NO: 25. In some embodiments, substitutions, insertions, or deletions occur in regions outside the CDRs (e.g., in the FRs). Optionally, the antibody or antigen-binding fragment thereof comprises the VH sequence SEQ ID NO: 25, including one or more post-translational modifications of that sequence. In a particular embodiment, the VH comprises one, two or three CDRs selected from: a. CDR-H1, comprising the amino acid sequence SEQ ID NO: 567, b. CDR-H2, comprising the amino acid sequence SEQ ID NO: 1109, and c. CDR-H3, comprising the amino acid sequence SEQ ID NO: 1651.

[1025] In one aspect, an antibody or antigen-binding fragment thereof is provided, wherein the antibody or antigen-binding fragment thereof comprises a light chain variable domain (VL) having at least 90%, 91%, 92%, 93%, 94%, 95%, 96%, 97%, 98%, 99%, or 100% sequence identity to the amino acid sequence SEQ ID NO: 296. In some embodiments, a VL sequence having at least 90%, 91%, 92%, 93%, 94%, 95%, 96%, 97%, 98%, or 99% identity contains substitutions (e.g., conservative substitutions), insertions, or deletions relative to the reference sequence, but an antibody or antigen-binding fragment thereof comprising that sequence retains the ability to bind to same antigen as the parent (e.g., cancer associated antigen). In some embodiments, a total of 1 to 10 amino acids have been substituted, inserted and/or deleted in the amino acid sequence SEQ ID NO: 296. In some embodiments, the substitutions, insertions, or deletions occur in regions outside the CDRs (e.g., in the FRs). Optionally, the antibody or antigen-binding fragment thereof comprises the VL sequence SEQ ID NO: 296, including one or more post-translational modifications of that sequence. In a particular embodiment, the VL comprises one, two or three CDRs selected from: a. CDR-L1, comprising the amino acid sequence SEQ ID NO: 838, b. CDR-L2, comprising the amino acid sequence SEQ ID NO: 1380, and c. CDR-L3, comprising the amino acid sequence SEQ ID NO: 1922.

[1026] In one aspect, an antibody or antigen-binding fragment thereof is provided, wherein the antibody or antigen-binding fragment thereof comprises a VH as in any of the embodiments provided above, and a VL as in any of the embodiments provided above. In some embodiments, the antibody or antigen-binding fragment thereof comprises the VH amino acid sequence of SEQ ID NO: 25, and the VL amino acid sequence of SEQ ID NO: 296, optionally including post-translational modifications of those sequences.

### TBRE1013

[1027] In one aspect, the present disclosure provides an antibody or antigen-binding fragment thereof comprising at least one or both variable regions selected from: a. VH comprising the amino acid sequence of SEQ ID NO: 26 and b. VL comprising the amino acid sequence of SEQ ID NO: 297.

[1028] In one aspect, the present disclosure provides an antibody or antigen-binding fragment thereof comprising at least one, two, three, four, five, or six CDRs selected from: a. CDR-H1 comprising the amino acid sequence of SEQ ID NO: 568, b. CDR-H2 comprising the amino acid sequence of SEQ ID NO: 1110, c. CDR-H3 comprising the amino acid sequence of SEQ ID NO: 1652, d. CDR-L1 comprising the amino acid sequence of SEQ ID NO: 839, e. CDR-L2 comprising the amino acid sequence of SEQ ID NO: 1381, and f. CDR-L3 comprising the amino acid sequence of SEQ ID NO: 1923.

[1029] In one aspect, the present disclosure provides an antibody or antigen-binding fragment thereof comprising: a. CDR-H1 comprising the amino acid sequence of SEQ ID NO: 568, b. CDR-H2 comprising the amino acid sequence of SEQ ID NO: 1110, c. CDR-H3 comprising the amino acid sequence of SEQ ID NO: 1652, d. CDR-L1 comprising the amino acid sequence of SEQ ID NO: 839, e. CDR-L2 comprising the amino acid sequence of SEQ ID NO: 1381, and f. CDR-L3 comprising the amino acid sequence of SEQ ID NO: 1923. In one aspect, the present disclosure provides an antibody or antigen-binding fragment thereof comprising a CDR-H3 comprising the amino acid sequence of SEQ ID NO: 1652, and a CDR-L3 comprising the amino acid sequence of SEQ ID NO: 1923.

[1030] In one aspect, the present disclosure provides an antibody or antigen-binding fragment thereof comprising at least one, at least two, or all three VH CDR sequences selected from: a. CDR-H1 comprising the amino acid sequence of SEQ ID NO: 568, b. CDR-H2 comprising the amino acid sequence of SEQ ID NO: 1110, c. CDR-H3 comprising the amino acid sequence of SEQ ID NO: 1652, and a VL comprising the amino acid sequence of SEQ ID NO: 297.

[1031] In one aspect, the present disclosure provides an antibody or antigen-binding fragment thereof comprising at least one, at least two, or all three VL CDR sequences selected from: a. CDR-L1 comprising the amino acid sequence of SEQ ID NO: 839, b. CDR-L2 comprising the amino acid sequence of SEQ ID NO: 1381, c. CDR-L3 comprising the amino acid sequence of SEQ ID NO: 1923, and a VH comprising the amino acid sequence of SEQ ID NO: 26.

[1032] In one aspect, an antibody or antigen-binding fragment thereof is provided, wherein the antibody or antigen-binding fragment thereof comprises a heavy chain variable domain (VH) having at least 90%, 91%, 92%, 93%, 94%, 95%, 96%, 97%, 98%, 99%, or 100% sequence identity to the amino acid sequence SEQ ID NO: 26. In some embodiments, a VH sequence having at least 90%, 91%, 92%, 93%, 94%, 95%, 96%, 97%, 98%, or 99% identity contains substitutions (e.g., conservative substitutions), insertions, or deletions relative to the reference sequence, but an antibody or antigen-binding fragment thereof comprising that sequence retains the ability to bind to same antigen as of the parent (e.g., cancer associated antigen). In some embodiments, a total of 1 to 10 amino acids have been substituted, inserted and/or deleted in the amino acid sequence SEQ ID NO: 26. In some embodiments, substitutions, insertions, or deletions occur in regions outside the CDRs (e.g., in the FRs). Optionally, the antibody or antigen-binding fragment thereof comprises the VH sequence SEQ ID NO: 26, including one or more post-translational modifications of that sequence. In a particular embodiment, the VH comprises one, two or three CDRs selected from: a. CDR-H1, comprising the amino acid sequence SEQ ID NO: 568, b. CDR-H2, comprising the amino acid sequence SEQ ID NO: 1110, and c. CDR-H3, comprising the amino acid sequence SEQ ID NO: 1652.

[1033] In one aspect, an antibody or antigen-binding fragment thereof is provided, wherein the antibody or antigen-binding fragment thereof comprises a light chain variable domain (VL) having at least 90%, 91%, 92%, 93%, 94%, 95%, 96%, 97%, 98%, 99%, or 100% sequence identity to the amino acid sequence SEQ ID NO: 297. In some embodiments, a VL sequence having at least 90%, 91%, 92%, 93%, 94%, 95%, 96%, 97%, 98%, or 99% identity contains substitutions (e.g., conservative substitutions), insertions, or deletions relative to the reference sequence, but an antibody or antigen-binding fragment thereof comprising that sequence retains the ability to bind to same antigen as the parent (e.g., cancer associated antigen). In some embodiments, a total of 1 to 10 amino acids have been substituted, inserted and/or deleted in the amino acid sequence SEQ ID NO: 297. In some embodiments, the substitutions, insertions, or deletions occur in regions outside the CDRs (e.g., in the FRs). Optionally, the antibody or antigen-binding fragment thereof comprises the VL sequence SEQ ID NO: 297, including one or more post-translational modifications of that sequence. In a particular embodiment, the VL comprises one, two or three CDRs selected from: a. CDR-L1, comprising the amino acid sequence SEQ ID NO: 839, b. CDR-L2, comprising the amino acid sequence SEQ ID NO: 1381, and c. CDR-L3, comprising the amino acid sequence SEQ ID NO: 1923.

[1034] In one aspect, an antibody or antigen-binding fragment thereof is provided, wherein the antibody or antigen-binding fragment thereof comprises a VH as in any of the embodiments provided above, and a VL as in any of the embodiments provided above. In some embodiments, the antibody or antigen-binding fragment thereof comprises the VH amino acid sequence of SEQ ID NO: 26, and the VL amino acid sequence of SEQ ID NO: 297, optionally including post-translational modifications of those sequences.

### TBRE1014

[1035] In one aspect, the present disclosure provides an antibody or antigen-binding fragment thereof comprising at least one or both variable regions selected from: a. VH comprising the amino acid sequence of SEQ ID NO: 27 and b. VL comprising the amino acid sequence of SEQ ID NO: 298.

[1036] In one aspect, the present disclosure provides an antibody or antigen-binding fragment thereof comprising at least one, two, three, four, five, or six CDRs selected from: a. CDR-H1 comprising the amino acid sequence of SEQ ID NO: 569, b. CDR-H2 comprising the amino acid sequence of SEQ ID NO: 1111, c. CDR-H3 comprising the amino acid sequence of SEQ ID NO: 1653, d. CDR-L1 comprising the amino acid sequence of SEQ ID NO: 840, e. CDR-L2 comprising the amino acid sequence of SEQ ID NO: 1382, and f. CDR-L3 comprising the amino acid sequence of SEQ ID NO: 1924.

[1037] In one aspect, the present disclosure provides an antibody or antigen-binding fragment thereof comprising: a. CDR-H1 comprising the amino acid sequence of SEQ ID NO: 569, b. CDR-H2 comprising the amino acid sequence of SEQ ID NO: 1111, c. CDR-H3 comprising the amino acid sequence of SEQ ID NO: 1653, d. CDR-L1 comprising the amino acid sequence of SEQ ID NO: 840, e. CDR-L2 comprising the amino acid sequence of SEQ ID NO: 1382, and f. CDR-L3 comprising the amino acid sequence of SEQ ID NO: 1924. In one aspect, the present disclosure provides an antibody or antigen-binding fragment thereof comprising a CDR-H3 comprising the amino acid sequence of SEQ ID NO: 1653, and a CDR-L3 comprising the amino acid sequence of SEQ ID NO: 1924.

[1038] In one aspect, the present disclosure provides an antibody or antigen-binding fragment thereof comprising at least one, at least two, or all three VH CDR sequences selected from: a. CDR-H1 comprising the amino acid sequence of SEQ ID NO: 569, b. CDR-H2 comprising the amino acid sequence of SEQ ID NO: 1111, c. CDR-H3 comprising the amino acid sequence of SEQ ID NO: 1653, and a VL comprising the amino acid sequence of SEQ ID NO: 298.

[1039] In one aspect, the present disclosure provides an antibody or antigen-binding fragment thereof comprising at least one, at least two, or all three VL CDR sequences selected from: a. CDR-L1 comprising the amino acid sequence of SEQ ID NO: 840, b. CDR-L2 comprising the amino acid sequence of SEQ ID NO: 1382, c. CDR-L3 comprising the amino acid sequence of SEQ ID NO: 1924, and a VH comprising the amino acid sequence of SEQ ID NO: 27.

[1040] In one aspect, an antibody or antigen-binding fragment thereof is provided, wherein the antibody or antigen-binding fragment thereof comprises a heavy chain variable domain (VH) having at least 90%, 91%, 92%, 93%, 94%, 95%, 96%, 97%, 98%, 99%, or 100% sequence identity to the amino acid sequence SEQ ID NO: 27. In some embodiments, a VH sequence having at least 90%, 91%, 92%, 93%, 94%, 95%, 96%, 97%, 98%, or 99% identity contains substitutions (e.g., conservative substitutions), insertions, or deletions relative to the reference sequence, but an antibody or antigen-binding fragment thereof comprising that sequence retains the ability to bind to same antigen as of the parent (e.g., cancer associated antigen). In some embodiments, a total of 1 to 10 amino acids have been substituted, inserted and/or deleted in the amino acid sequence SEQ ID NO: 27. In some embodiments, substitutions, insertions, or deletions occur in regions outside the CDRs (e.g., in the FRs). Optionally, the antibody or antigen-binding fragment thereof comprises the VH sequence SEQ ID NO: 27, including one or more post-translational modifications of that sequence. In a particular embodiment, the VH comprises one, two or three CDRs selected from: a. CDR-H1, comprising the amino acid sequence SEQ ID NO: 569, b. CDR-H2, comprising the amino acid sequence SEQ ID NO: 1111, and c. CDR-H3, comprising the amino acid sequence SEQ ID NO: 1653.

[1041] In one aspect, an antibody or antigen-binding fragment thereof is provided, wherein the antibody or antigen-binding fragment thereof comprises a light chain variable domain (VL) having at least 90%, 91%, 92%, 93%, 94%, 95%, 96%, 97%, 98%, 99%, or 100% sequence identity to the amino acid sequence SEQ ID NO: 298. In some embodiments, a VL sequence having at least 90%, 91%, 92%, 93%, 94%, 95%, 96%, 97%, 98%, or 99% identity contains substitutions (e.g., conservative substitutions), insertions, or deletions relative to the reference sequence, but an antibody or antigen-binding fragment thereof comprising that sequence retains the ability to bind to same antigen as the parent (e.g., cancer associated antigen). In some embodiments, a total of 1 to 10 amino acids have been substituted, inserted and/or deleted in the amino acid sequence SEQ ID NO: 298. In some embodiments, the substitutions, insertions, or deletions occur in regions outside the CDRs (e.g., in the FRs). Optionally, the antibody or antigen-binding fragment thereof comprises the VL sequence SEQ ID NO: 298, including one or more post-translational modifications of that sequence. In a particular embodiment, the VL comprises one, two or three CDRs selected from: a. CDR-L1, comprising the amino acid sequence SEQ ID NO: 840, b. CDR-L2, comprising the amino acid sequence SEQ ID NO: 1382, and c. CDR-L3, comprising the amino acid sequence SEQ ID NO: 1924.

[1042] In one aspect, an antibody or antigen-binding fragment thereof is provided, wherein the antibody or antigen-binding fragment thereof comprises a VH as in any of the embodiments provided above, and a VL as in any of the embodiments provided above. In some embodiments, the antibody or antigen-binding fragment thereof comprises the VH amino acid sequence of SEQ ID NO: 27, and the VL amino acid sequence of SEQ ID NO: 298, optionally including post-translational modifications of those sequences.

### TBRE1015

[1043] In one aspect, the present disclosure provides an antibody or antigen-binding fragment thereof comprising at least one or both variable regions selected from: a. VH comprising the amino acid sequence of SEQ ID NO: 28 and b. VL comprising the amino acid sequence of SEQ ID NO: 299.

[1044] In one aspect, the present disclosure provides an antibody or antigen-binding fragment thereof comprising at least one, two, three, four, five, or six CDRs selected from: a. CDR-H1 comprising the amino acid sequence of SEQ ID NO: 570, b. CDR-H2 comprising the amino acid sequence of SEQ ID NO: 1112, c. CDR-H3 comprising the amino acid sequence of SEQ ID NO: 1654, d. CDR-L1 comprising the amino acid sequence of SEQ ID NO: 841, e. CDR-L2 comprising the amino acid sequence of SEQ ID NO: 1383, and f. CDR-L3 comprising the amino acid sequence of SEQ ID NO: 1925.

[1045] In one aspect, the present disclosure provides an antibody or antigen-binding fragment thereof comprising: a. CDR-H1 comprising the amino acid sequence of SEQ ID NO: 570, b. CDR-H2 comprising the amino acid sequence of SEQ ID NO: 1112, c. CDR-H3 comprising the amino acid sequence of SEQ ID NO: 1654, d. CDR-L1 comprising the amino acid sequence of SEQ ID NO: 841, e. CDR-L2 comprising the amino acid sequence of SEQ ID NO: 1383, and f. CDR-L3 comprising the amino acid sequence of SEQ ID NO: 1925. In one aspect, the present disclosure provides an antibody or antigen-binding fragment thereof comprising a CDR-H3 comprising the amino acid sequence of SEQ ID NO: 1654, and a CDR-L3 comprising the amino acid sequence of SEQ ID NO: 1925.

[1046] In one aspect, the present disclosure provides an antibody or antigen-binding fragment thereof comprising at least one, at least two, or all three VH CDR sequences selected from: a. CDR-H1 comprising the amino acid sequence of SEQ ID NO: 570, b. CDR-H2 comprising the amino acid sequence of SEQ ID NO: 1112, c. CDR-H3 comprising the amino acid sequence of SEQ ID NO: 1654, and a VL comprising the amino acid sequence of SEQ ID NO: 299.

[1047] In one aspect, the present disclosure provides an antibody or antigen-binding fragment thereof comprising at least one, at least two, or all three VL CDR sequences selected from: a. CDR-L1 comprising the amino acid sequence of SEQ ID NO: 841, b. CDR-L2 comprising the amino acid sequence of SEQ ID NO: 1383, c. CDR-L3 comprising the amino acid sequence of SEQ ID NO: 1925, and a VH comprising the amino acid sequence of SEQ ID NO: 28.

[1048] In one aspect, an antibody or antigen-binding fragment thereof is provided, wherein the antibody or antigen-binding fragment thereof comprises a heavy chain variable domain (VH) having at least 90%, 91%, 92%, 93%, 94%, 95%, 96%, 97%, 98%, 99%, or 100% sequence identity to the amino acid sequence SEQ ID NO: 28. In some embodiments, a VH sequence having at least 90%, 91%, 92%, 93%, 94%, 95%, 96%, 97%, 98%, or 99% identity contains substitutions (e.g., conservative substitutions), insertions, or deletions relative to the reference sequence, but an antibody or antigen-binding fragment thereof comprising that sequence retains the ability to bind to same antigen as of the parent (e.g., cancer associated antigen). In some embodiments, a total of 1 to 10 amino acids have been substituted, inserted and/or deleted in the amino acid sequence SEQ ID NO: 28. In some embodiments, substitutions, insertions, or deletions occur in regions outside the CDRs (e.g., in the FRs). Optionally, the antibody or antigen-binding fragment thereof comprises the VH sequence SEQ ID NO: 28, including one or more post-translational modifications of that sequence. In a particular embodiment, the VH comprises one, two or three CDRs selected from: a. CDR-H1, comprising the amino acid sequence SEQ ID NO: 570, b. CDR-H2, comprising the amino acid sequence SEQ ID NO: 1112, and c. CDR-H3, comprising the amino acid sequence SEQ ID NO: 1654.

[1049] In one aspect, an antibody or antigen-binding fragment thereof is provided, wherein the antibody or antigen-binding fragment thereof comprises a light chain variable domain (VL) having at least 90%, 91%, 92%, 93%, 94%, 95%, 96%, 97%, 98%, 99%, or 100% sequence identity to the amino acid sequence SEQ ID NO: 299. In some embodiments, a VL sequence having at least 90%, 91%, 92%, 93%, 94%, 95%, 96%, 97%, 98%, or 99% identity contains substitutions (e.g., conservative substitutions), insertions, or deletions relative to the reference sequence, but an antibody or antigen-binding fragment thereof comprising that sequence retains the ability to bind to same antigen as the parent (e.g., cancer associated antigen). In some embodiments, a total of 1 to 10 amino acids have been substituted, inserted and/or deleted in the amino acid sequence SEQ ID NO: 299. In some embodiments, the substitutions, insertions, or deletions occur in regions outside the CDRs (e.g., in the FRs). Optionally, the antibody or antigen-binding fragment thereof comprises the VL sequence SEQ ID NO: 299, including one or more post-translational modifications of that sequence. In a particular embodiment, the VL comprises one, two or three CDRs selected from: a. CDR-L1, comprising the amino acid sequence SEQ ID NO: 841, b. CDR-L2, comprising the amino acid sequence SEQ ID NO: 1383, and c. CDR-L3, comprising the amino acid sequence SEQ ID NO: 1925.

[1050] In one aspect, an antibody or antigen-binding fragment thereof is provided, wherein the antibody or antigen-binding fragment thereof comprises a VH as in any of the embodiments provided above, and a VL as in any of the embodiments provided above. In some embodiments, the antibody or antigen-binding fragment thereof comprises the VH amino acid sequence of SEQ ID NO: 28, and the VL amino acid sequence of SEQ ID NO: 299, optionally including post-translational modifications of those sequences.

### TBRE1016

[1051] In one aspect, the present disclosure provides an antibody or antigen-binding fragment thereof comprising at least one or both variable regions selected from: a. VH comprising the amino acid sequence of SEQ ID NO: 29 and b. VL comprising the amino acid sequence of SEQ ID NO: 300.

[1052] In one aspect, the present disclosure provides an antibody or antigen-binding fragment thereof comprising at least one, two, three, four, five, or six CDRs selected from: a. CDR-H1 comprising the amino acid sequence of SEQ ID NO: 571, b. CDR-H2 comprising the amino acid sequence of SEQ ID NO: 1113, c. CDR-H3 comprising the amino acid sequence of SEQ ID NO: 1655, d. CDR-L1 comprising the amino acid sequence of SEQ ID NO: 842, e. CDR-L2 comprising the amino acid sequence of SEQ ID NO: 1384, and f. CDR-L3 comprising the amino acid sequence of SEQ ID NO: 1926.

[1053] In one aspect, the present disclosure provides an antibody or antigen-binding fragment thereof comprising: a. CDR-H1 comprising the amino acid sequence of SEQ ID NO: 571, b. CDR-H2 comprising the amino acid sequence of SEQ ID NO: 1113, c. CDR-H3 comprising the amino acid sequence of SEQ ID NO: 1655, d. CDR-L1 comprising the amino acid sequence of SEQ ID NO: 842, e. CDR-L2 comprising the amino acid sequence of SEQ ID NO: 1384, and f. CDR-L3 comprising the amino acid sequence of SEQ ID NO: 1926. In one aspect, the present disclosure provides an antibody or antigen-binding fragment thereof comprising a CDR-H3 comprising the amino acid sequence of SEQ ID NO: 1655, and a CDR-L3 comprising the amino acid sequence of SEQ ID NO: 1926.

[1054] In one aspect, the present disclosure provides an antibody or antigen-binding fragment thereof comprising at least one, at least two, or all three VH CDR sequences selected from: a. CDR-H1 comprising the amino acid sequence of SEQ ID NO: 571, b. CDR-H2 comprising the amino acid sequence of SEQ ID NO: 1113, c. CDR-H3 comprising the amino acid sequence of SEQ ID NO: 1655, and a VL comprising the amino acid sequence of SEQ ID NO: 300.

[1055] In one aspect, the present disclosure provides an antibody or antigen-binding fragment thereof comprising at least one, at least two, or all three VL CDR sequences selected from: a. CDR-L1 comprising the amino acid sequence of SEQ ID NO: 842, b. CDR-L2 comprising the amino acid sequence of SEQ ID NO: 1384, c. CDR-L3 comprising the amino acid sequence of SEQ ID NO: 1926, and a VH comprising the amino acid sequence of SEQ ID NO: 29.

[1056] In one aspect, an antibody or antigen-binding fragment thereof is provided, wherein the antibody or antigen-binding fragment thereof comprises a heavy chain variable domain (VH) having at least 90%, 91%, 92%, 93%, 94%, 95%, 96%, 97%, 98%, 99%, or 100% sequence identity to the amino acid sequence SEQ ID NO: 29. In some embodiments, a VH sequence having at least 90%, 91%, 92%, 93%, 94%, 95%, 96%, 97%, 98%, or 99% identity contains substitutions (e.g., conservative substitutions), insertions, or deletions relative to the reference sequence, but an antibody or antigen-binding fragment thereof comprising that sequence retains the ability to bind to same antigen as of the parent (e.g., cancer associated antigen). In some embodiments, a total of 1 to 10 amino acids have been substituted, inserted and/or deleted in the amino acid sequence SEQ ID NO: 29. In some embodiments, substitutions, insertions, or deletions occur in regions outside the CDRs (e.g., in the FRs). Optionally, the antibody or antigen-binding fragment thereof comprises the VH sequence SEQ ID NO: 29, including one or more post-translational modifications of that sequence. In a particular embodiment, the VH comprises one, two or three CDRs selected from: a. CDR-H1, comprising the amino acid sequence SEQ ID NO: 571, b. CDR-H2, comprising the amino acid sequence SEQ ID NO: 1113, and c. CDR-H3, comprising the amino acid sequence SEQ ID NO: 1655.

[1057] In one aspect, an antibody or antigen-binding fragment thereof is provided, wherein the antibody or antigen-binding fragment thereof comprises a light chain variable domain (VL) having at least 90%, 91%, 92%, 93%, 94%, 95%, 96%, 97%, 98%, 99%, or 100% sequence identity to the amino acid sequence SEQ ID NO: 300. In some embodiments, a VL sequence having at least 90%, 91%, 92%, 93%, 94%, 95%, 96%, 97%, 98%, or 99% identity contains substitutions (e.g., conservative substitutions), insertions, or deletions relative to the reference sequence, but an antibody or antigen-binding fragment thereof comprising that sequence retains the ability to bind to same antigen as the parent (e.g., cancer associated antigen). In some embodiments, a total of 1 to 10 amino acids have been substituted, inserted and/or deleted in the amino acid sequence SEQ ID NO: 300. In some embodiments, the substitutions, insertions, or deletions occur in regions outside the CDRs (e.g., in the FRs). Optionally, the antibody or antigen-binding fragment thereof comprises the VL sequence SEQ ID NO: 300, including one or more post-translational modifications of that sequence. In a particular embodiment, the VL comprises one, two or three CDRs selected from: a. CDR-L1, comprising the amino acid sequence SEQ ID NO: 842, b. CDR-L2, comprising the amino acid sequence SEQ ID NO: 1384, and c. CDR-L3, comprising the amino acid sequence SEQ ID NO: 1926.

[1058] In one aspect, an antibody or antigen-binding fragment thereof is provided, wherein the antibody or antigen-binding fragment thereof comprises a VH as in any of the embodiments provided above, and a VL as in any of the embodiments provided above. In some embodiments, the antibody or antigen-binding fragment thereof comprises the VH amino acid sequence of SEQ ID NO: 29, and the VL amino acid sequence of SEQ ID NO: 300, optionally including post-translational modifications of those sequences.

### TBRE1017

[1059] In one aspect, the present disclosure provides an antibody or antigen-binding fragment thereof comprising at least one or both variable regions selected from: a. VH comprising the amino acid sequence of SEQ ID NO: 30 and b. VL comprising the amino acid sequence of SEQ ID NO: 301.

[1060] In one aspect, the present disclosure provides an antibody or antigen-binding fragment thereof comprising at least one, two, three, four, five, or six CDRs selected from: a. CDR-H1 comprising the amino acid sequence of SEQ ID NO: 572, b. CDR-H2 comprising the amino acid sequence of SEQ ID NO: 1114, c. CDR-H3 comprising the amino acid sequence of SEQ ID NO: 1656, d. CDR-L1 comprising the amino acid sequence of SEQ ID NO: 843, e. CDR-L2 comprising the amino acid sequence of SEQ ID NO: 1385, and f. CDR-L3 comprising the amino acid sequence of SEQ ID NO: 1927.

[1061] In one aspect, the present disclosure provides an antibody or antigen-binding fragment thereof comprising: a. CDR-H1 comprising the amino acid sequence of SEQ ID NO: 572, b. CDR-H2 comprising the amino acid sequence of SEQ ID NO: 1114, c. CDR-H3 comprising the amino acid sequence of SEQ ID NO: 1656, d. CDR-L1 comprising the amino acid sequence of SEQ ID NO: 843, e. CDR-L2 comprising the amino acid sequence of SEQ ID NO: 1385, and f. CDR-L3 comprising the amino acid sequence of SEQ ID NO: 1927. In one aspect, the present disclosure provides an antibody or antigen-binding fragment thereof comprising a CDR-H3 comprising the amino acid sequence of SEQ ID NO: 1656, and a CDR-L3 comprising the amino acid sequence of SEQ ID NO: 1927.

[1062] In one aspect, the present disclosure provides an antibody or antigen-binding fragment thereof comprising at least one, at least two, or all three VH CDR sequences selected from: a. CDR-H1 comprising the amino acid sequence of SEQ ID NO: 572, b. CDR-H2 comprising the amino acid sequence of SEQ ID NO: 1114, c. CDR-H3 comprising the amino acid sequence of SEQ ID NO: 1656, and a VL comprising the amino acid sequence of SEQ ID NO: 301.

[1063] In one aspect, the present disclosure provides an antibody or antigen-binding fragment thereof comprising at least one, at least two, or all three VL CDR sequences selected from: a. CDR-L1 comprising the amino acid sequence of SEQ ID NO: 843, b. CDR-L2 comprising the amino acid sequence of SEQ ID NO: 1385, c. CDR-L3 comprising the amino acid sequence of SEQ ID NO: 1927, and a VH comprising the amino acid sequence of SEQ ID NO: 30.

[1064] In one aspect, an antibody or antigen-binding fragment thereof is provided, wherein the antibody or antigen-binding fragment thereof comprises a heavy chain variable domain (VH) having at least 90%, 91%, 92%, 93%, 94%, 95%, 96%, 97%, 98%, 99%, or 100% sequence identity to the amino acid sequence SEQ ID NO: 30. In some embodiments, a VH sequence having at least 90%, 91%, 92%, 93%, 94%, 95%, 96%, 97%, 98%, or 99% identity contains substitutions (e.g., conservative substitutions), insertions, or deletions relative to the reference sequence, but an antibody or antigen-binding fragment thereof comprising that sequence retains the ability to bind to same antigen as of the parent (e.g., cancer associated antigen). In some embodiments, a total of 1 to 10 amino acids have been substituted, inserted and/or deleted in the amino acid sequence SEQ ID NO: 30. In some embodiments, substitutions, insertions, or deletions occur in regions outside the CDRs (e.g., in the FRs). Optionally, the antibody or antigen-binding fragment thereof comprises the VH sequence SEQ ID NO: 30, including one or more post-translational modifications of that sequence. In a particular embodiment, the VH comprises one, two or three CDRs selected from: a. CDR-H1, comprising the amino acid sequence SEQ ID NO: 572, b. CDR-H2, comprising the amino acid sequence SEQ ID NO: 1114, and c. CDR-H3, comprising the amino acid sequence SEQ ID NO: 1656.

[1065] In one aspect, an antibody or antigen-binding fragment thereof is provided, wherein the antibody or antigen-binding fragment thereof comprises a light chain variable domain (VL) having at least 90%, 91%, 92%, 93%, 94%, 95%, 96%, 97%, 98%, 99%, or 100% sequence identity to the amino acid sequence SEQ ID NO: 301. In some embodiments, a VL sequence having at least 90%, 91%, 92%, 93%, 94%, 95%, 96%, 97%, 98%, or 99% identity contains substitutions (e.g., conservative substitutions), insertions, or deletions relative to the reference sequence, but an antibody or antigen-binding fragment thereof comprising that sequence retains the ability to bind to same antigen as the parent (e.g., cancer associated antigen). In some embodiments, a total of 1 to 10 amino acids have been substituted, inserted and/or deleted in the amino acid sequence SEQ ID NO: 301. In some embodiments, the substitutions, insertions, or deletions occur in regions outside the CDRs (e.g., in the FRs). Optionally, the antibody or antigen-binding fragment thereof comprises the VL sequence SEQ ID NO: 301, including one or more post-translational modifications of that sequence. In a particular embodiment, the VL comprises one, two or three CDRs selected from: a. CDR-L1, comprising the amino acid sequence SEQ ID NO: 843, b. CDR-L2, comprising the amino acid sequence SEQ ID NO: 1385, and c. CDR-L3, comprising the amino acid sequence SEQ ID NO: 1927.

[1066] In one aspect, an antibody or antigen-binding fragment thereof is provided, wherein the antibody or antigen-binding fragment thereof comprises a VH as in any of the embodiments provided above, and a VL as in any of the embodiments provided above. In some embodiments, the antibody or antigen-binding fragment thereof comprises the VH amino acid sequence of SEQ ID NO: 30, and the VL amino acid sequence of SEQ ID NO: 301, optionally including post-translational modifications of those sequences.

### TBRE1018

[1067] In one aspect, the present disclosure provides an antibody or antigen-binding fragment thereof comprising at least one or both variable regions selected from: a. VH comprising the amino acid sequence of SEQ ID NO: 31 and b. VL comprising the amino acid sequence of SEQ ID NO: 302.

[1068] In one aspect, the present disclosure provides an antibody or antigen-binding fragment thereof comprising at least one, two, three, four, five, or six CDRs selected from: a. CDR-H1 comprising the amino acid sequence of SEQ ID NO: 573, b. CDR-H2 comprising the amino acid sequence of SEQ ID NO: 1115, c. CDR-H3 comprising the amino acid sequence of SEQ ID NO: 1657, d. CDR-L1 comprising the amino acid sequence of SEQ ID NO: 844, e. CDR-L2 comprising the amino acid sequence of SEQ ID NO: 1386, and f. CDR-L3 comprising the amino acid sequence of SEQ ID NO: 1928.

[1069] In one aspect, the present disclosure provides an antibody or antigen-binding fragment thereof comprising: a. CDR-H1 comprising the amino acid sequence of SEQ ID NO: 573, b. CDR-H2 comprising the amino acid sequence of SEQ ID NO: 1115, c. CDR-H3 comprising the amino acid sequence of SEQ ID NO: 1657, d. CDR-L1 comprising the amino acid sequence of SEQ ID NO: 844, e. CDR-L2 comprising the amino acid sequence of SEQ ID NO: 1386, and f. CDR-L3 comprising the amino acid sequence of SEQ ID NO: 1928. In one aspect, the present disclosure provides an antibody or antigen-binding fragment thereof comprising a CDR-H3 comprising the amino acid sequence of SEQ ID NO: 1657, and a CDR-L3 comprising the amino acid sequence of SEQ ID NO: 1928.

[1070] In one aspect, the present disclosure provides an antibody or antigen-binding fragment thereof comprising at least one, at least two, or all three VH CDR sequences selected from: a. CDR-H1 comprising the amino acid sequence of SEQ ID NO: 573, b. CDR-H2 comprising the amino acid sequence of SEQ ID NO: 1115, c. CDR-H3 comprising the amino acid sequence of SEQ ID NO: 1657, and a VL comprising the amino acid sequence of SEQ ID NO: 302.

[1071] In one aspect, the present disclosure provides an antibody or antigen-binding fragment thereof comprising at least one, at least two, or all three VL CDR sequences selected from: a. CDR-L1 comprising the amino acid sequence of SEQ ID NO: 844, b. CDR-L2 comprising the amino acid sequence of SEQ ID NO: 1386, c. CDR-L3 comprising the amino acid sequence of SEQ ID NO: 1928, and a VH comprising the amino acid sequence of SEQ ID NO: 31.

[1072] In one aspect, an antibody or antigen-binding fragment thereof is provided, wherein the antibody or antigen-binding fragment thereof comprises a heavy chain variable domain (VH) having at least 90%, 91%, 92%, 93%, 94%, 95%, 96%, 97%, 98%, 99%, or 100% sequence identity to the amino acid sequence SEQ ID NO: 31. In some embodiments, a VH sequence having at least 90%, 91%, 92%, 93%, 94%, 95%, 96%, 97%, 98%, or 99% identity contains substitutions (e.g., conservative substitutions), insertions, or deletions relative to the reference sequence, but an antibody or antigen-binding fragment thereof comprising that sequence retains the ability to bind to same antigen as of the parent (e.g., cancer associated antigen). In some embodiments, a total of 1 to 10 amino acids have been substituted, inserted and/or deleted in the amino acid sequence SEQ ID NO: 31. In some embodiments, substitutions, insertions, or deletions occur in regions outside the CDRs (e.g., in the FRs). Optionally, the antibody or antigen-binding fragment thereof comprises the VH sequence SEQ ID NO: 31, including one or more post-translational modifications of that sequence. In a particular embodiment, the VH comprises one, two or three CDRs selected from: a. CDR-H1, comprising the amino acid sequence SEQ ID NO: 573, b. CDR-H2, comprising the amino acid sequence SEQ ID NO: 1115, and c. CDR-H3, comprising the amino acid sequence SEQ ID NO: 1657.

[1073] In one aspect, an antibody or antigen-binding fragment thereof is provided, wherein the antibody or antigen-binding fragment thereof comprises a light chain variable domain (VL) having at least 90%, 91%, 92%, 93%, 94%, 95%, 96%, 97%, 98%, 99%, or 100% sequence identity to the amino acid sequence SEQ ID NO: 302. In some embodiments, a VL sequence having at least 90%, 91%, 92%, 93%, 94%, 95%, 96%, 97%, 98%, or 99% identity contains substitutions (e.g., conservative substitutions), insertions, or deletions relative to the reference sequence, but an antibody or antigen-binding fragment thereof comprising that sequence retains the ability to bind to same antigen as the parent (e.g., cancer associated antigen). In some embodiments, a total of 1 to 10 amino acids have been substituted, inserted and/or deleted in the amino acid sequence SEQ ID NO: 302. In some embodiments, the substitutions, insertions, or deletions occur in regions outside the CDRs (e.g., in the FRs). Optionally, the antibody or antigen-binding fragment thereof comprises the VL sequence SEQ ID NO: 302, including one or more post-translational modifications of that sequence. In a particular embodiment, the VL comprises one, two or three CDRs selected from: a. CDR-L1, comprising the amino acid sequence SEQ ID NO: 844, b. CDR-L2, comprising the amino acid sequence SEQ ID NO: 1386, and c. CDR-L3, comprising the amino acid sequence SEQ ID NO: 1928.

[1074] In one aspect, an antibody or antigen-binding fragment thereof is provided, wherein the antibody or antigen-binding fragment thereof comprises a VH as in any of the embodiments provided above, and a VL as in any of the embodiments provided above. In some embodiments, the antibody or antigen-binding fragment thereof comprises the VH amino acid sequence of SEQ ID NO: 31, and the VL amino acid sequence of SEQ ID NO: 302, optionally including post-translational modifications of those sequences.

### TBRE1019

[1075] In one aspect, the present disclosure provides an antibody or antigen-binding fragment thereof comprising at least one or both variable regions selected from: a. VH comprising the amino acid sequence of SEQ ID NO: 32 and b. VL comprising the amino acid sequence of SEQ ID NO: 303.

[1076] In one aspect, the present disclosure provides an antibody or antigen-binding fragment thereof comprising at least one, two, three, four, five, or six CDRs selected from: a. CDR-H1 comprising the amino acid sequence of SEQ ID NO: 574, b. CDR-H2 comprising the amino acid sequence of SEQ ID NO: 1116, c. CDR-H3 comprising the amino acid sequence of SEQ ID NO: 1658, d. CDR-L1 comprising the amino acid sequence of SEQ ID NO: 845, e. CDR-L2 comprising the amino acid sequence of SEQ ID NO: 1387, and f. CDR-L3 comprising the amino acid sequence of SEQ ID NO: 1929.

[1077] In one aspect, the present disclosure provides an antibody or antigen-binding fragment thereof comprising: a. CDR-H1 comprising the amino acid sequence of SEQ ID NO: 574, b. CDR-H2 comprising the amino acid sequence of SEQ ID NO: 1116, c. CDR-H3 comprising the amino acid sequence of SEQ ID NO: 1658, d. CDR-L1 comprising the amino acid sequence of SEQ ID NO: 845, e. CDR-L2 comprising the amino acid sequence of SEQ ID NO: 1387, and f. CDR-L3 comprising the amino acid sequence of SEQ ID NO: 1929. In one aspect, the present disclosure provides an antibody or antigen-binding fragment thereof comprising a CDR-H3 comprising the amino acid sequence of SEQ ID NO: 1658, and a CDR-L3 comprising the amino acid sequence of SEQ ID NO: 1929.

[1078] In one aspect, the present disclosure provides an antibody or antigen-binding fragment thereof comprising at least one, at least two, or all three VH CDR sequences selected from: a. CDR-H1 comprising the amino acid sequence of SEQ ID NO: 574, b. CDR-H2 comprising the amino acid sequence of SEQ ID NO: 1116, c. CDR-H3 comprising the amino acid sequence of SEQ ID NO: 1658, and a VL comprising the amino acid sequence of SEQ ID NO: 303.

[1079] In one aspect, the present disclosure provides an antibody or antigen-binding fragment thereof comprising at least one, at least two, or all three VL CDR sequences selected from: a. CDR-L1 comprising the amino acid sequence of SEQ ID NO: 845, b. CDR-L2 comprising the amino acid sequence of SEQ ID NO: 1387, c. CDR-L3 comprising the amino acid sequence of SEQ ID NO: 1929, and a VH comprising the amino acid sequence of SEQ ID NO: 32.

[1080] In one aspect, an antibody or antigen-binding fragment thereof is provided, wherein the antibody or antigen-binding fragment thereof comprises a heavy chain variable domain (VH) having at least 90%, 91%, 92%, 93%, 94%, 95%, 96%, 97%, 98%, 99%, or 100% sequence identity to the amino acid sequence SEQ ID NO: 32. In some embodiments, a VH sequence having at least 90%, 91%, 92%, 93%, 94%, 95%, 96%, 97%, 98%, or 99% identity contains substitutions (e.g., conservative substitutions), insertions, or deletions relative to the reference sequence, but an antibody or antigen-binding fragment thereof comprising that sequence retains the ability to bind to same antigen as of the parent (e.g., cancer associated antigen). In some embodiments, a total of 1 to 10 amino acids have been substituted, inserted and/or deleted in the amino acid sequence SEQ ID NO: 32. In some embodiments, substitutions, insertions, or deletions occur in regions outside the CDRs (e.g., in the FRs). Optionally, the antibody or antigen-binding fragment thereof comprises the VH sequence SEQ ID NO: 32, including one or more post-translational modifications of that sequence. In a particular embodiment, the VH comprises one, two or three CDRs selected from: a. CDR-H1, comprising the amino acid sequence SEQ ID NO: 574, b. CDR-H2, comprising the amino acid sequence SEQ ID NO: 1116, and c. CDR-H3, comprising the amino acid sequence SEQ ID NO: 1658.

[1081] In one aspect, an antibody or antigen-binding fragment thereof is provided, wherein the antibody or antigen-binding fragment thereof comprises a light chain variable domain (VL) having at least 90%, 91%, 92%, 93%, 94%, 95%, 96%, 97%, 98%, 99%, or 100% sequence identity to the amino acid sequence SEQ ID NO: 303. In some embodiments, a VL sequence having at least 90%, 91%, 92%, 93%, 94%, 95%, 96%, 97%, 98%, or 99% identity contains substitutions (e.g., conservative substitutions), insertions, or deletions relative to the reference sequence, but an antibody or antigen-binding fragment thereof comprising that sequence retains the ability to bind to same antigen as the parent (e.g., cancer associated antigen). In some embodiments, a total of 1 to 10 amino acids have been substituted, inserted and/or deleted in the amino acid sequence SEQ ID NO: 303. In some embodiments, the substitutions, insertions, or deletions occur in regions outside the CDRs (e.g., in the FRs). Optionally, the antibody or antigen-binding fragment thereof comprises the VL sequence SEQ ID NO: 303, including one or more post-translational modifications of that sequence. In a particular embodiment, the VL comprises one, two or three CDRs selected from: a. CDR-L1, comprising the amino acid sequence SEQ ID NO: 845, b. CDR-L2, comprising the amino acid sequence SEQ ID NO: 1387, and c. CDR-L3, comprising the amino acid sequence SEQ ID NO: 1929.

[1082] In one aspect, an antibody or antigen-binding fragment thereof is provided, wherein the antibody or antigen-binding fragment thereof comprises a VH as in any of the embodiments provided above, and a VL as in any of the embodiments provided above. In some embodiments, the antibody or antigen-binding fragment thereof comprises the VH amino acid sequence of SEQ ID NO: 32, and the VL amino acid sequence of SEQ ID NO: 303, optionally including post-translational modifications of those sequences.

### TBRE1020

[1083] In one aspect, the present disclosure provides an antibody or antigen-binding fragment thereof comprising at least one or both variable regions selected from: a. VH comprising the amino acid sequence of SEQ ID NO: 33 and b. VL comprising the amino acid sequence of SEQ ID NO: 304.

[1084] In one aspect, the present disclosure provides an antibody or antigen-binding fragment thereof comprising at least one, two, three, four, five, or six CDRs selected from: a. CDR-H1 comprising the amino acid sequence of SEQ ID NO: 575, b. CDR-H2 comprising the amino acid sequence of SEQ ID NO: 1117, c. CDR-H3 comprising the amino acid sequence of SEQ ID NO: 1659, d. CDR-L1 comprising the amino acid sequence of SEQ ID NO: 846, e. CDR-L2 comprising the amino acid sequence of SEQ ID NO: 1388, and f. CDR-L3 comprising the amino acid sequence of SEQ ID NO: 1930.

[1085] In one aspect, the present disclosure provides an antibody or antigen-binding fragment thereof comprising: a. CDR-H1 comprising the amino acid sequence of SEQ ID NO: 575, b. CDR-H2 comprising the amino acid sequence of SEQ ID NO: 1117, c. CDR-H3 comprising the amino acid sequence of SEQ ID NO: 1659, d. CDR-L1 comprising the amino acid sequence of SEQ ID NO: 846, e. CDR-L2 comprising the amino acid sequence of SEQ ID NO: 1388, and f. CDR-L3 comprising the amino acid sequence of SEQ ID NO: 1930. In one aspect, the present disclosure provides an antibody or antigen-binding fragment thereof comprising a CDR-H3 comprising the amino acid sequence of SEQ ID NO: 1659, and a CDR-L3 comprising the amino acid sequence of SEQ ID NO: 1930.

[1086] In one aspect, the present disclosure provides an antibody or antigen-binding fragment thereof comprising at least one, at least two, or all three VH CDR sequences selected from: a. CDR-H1 comprising the amino acid sequence of SEQ ID NO: 575, b. CDR-H2 comprising the amino acid sequence of SEQ ID NO: 1117, c. CDR-H3 comprising the amino acid sequence of SEQ ID NO: 1659, and a VL comprising the amino acid sequence of SEQ ID NO: 304.

[1087] In one aspect, the present disclosure provides an antibody or antigen-binding fragment thereof comprising at least one, at least two, or all three VL CDR sequences selected from: a. CDR-L1 comprising the amino acid sequence of SEQ ID NO: 846, b. CDR-L2 comprising the amino acid sequence of SEQ ID NO: 1388, c. CDR-L3 comprising the amino acid sequence of SEQ ID NO: 1930, and a VH comprising the amino acid sequence of SEQ ID NO: 33.

[1088] In one aspect, an antibody or antigen-binding fragment thereof is provided, wherein the antibody or antigen-binding fragment thereof comprises a heavy chain variable domain (VH) having at least 90%, 91%, 92%, 93%, 94%, 95%, 96%, 97%, 98%, 99%, or 100% sequence identity to the amino acid sequence SEQ ID NO: 33. In some embodiments, a VH sequence having at least 90%, 91%, 92%, 93%, 94%, 95%, 96%, 97%, 98%, or 99% identity contains substitutions (e.g., conservative substitutions), insertions, or deletions relative to the reference sequence, but an antibody or antigen-binding fragment thereof comprising that sequence retains the ability to bind to same antigen as of the parent (e.g., cancer associated antigen). In some embodiments, a total of 1 to 10 amino acids have been substituted, inserted and/or deleted in the amino acid sequence SEQ ID NO: 33. In some embodiments, substitutions, insertions, or deletions occur in regions outside the CDRs (e.g., in the FRs). Optionally, the antibody or antigen-binding fragment thereof comprises the VH sequence SEQ ID NO: 33, including one or more post-translational modifications of that sequence. In a particular embodiment, the VH comprises one, two or three CDRs selected from: a. CDR-H1, comprising the amino acid sequence SEQ ID NO: 575, b. CDR-H2, comprising the amino acid sequence SEQ ID NO: 1117, and c. CDR-H3, comprising the amino acid sequence SEQ ID NO: 1659.

[1089] In one aspect, an antibody or antigen-binding fragment thereof is provided, wherein the antibody or antigen-binding fragment thereof comprises a light chain variable domain (VL) having at least 90%, 91%, 92%, 93%, 94%, 95%, 96%, 97%, 98%, 99%, or 100% sequence identity to the amino acid sequence SEQ ID NO: 304. In some embodiments, a VL sequence having at least 90%, 91%, 92%, 93%, 94%, 95%, 96%, 97%, 98%, or 99% identity contains substitutions (e.g., conservative substitutions), insertions, or deletions relative to the reference sequence, but an antibody or antigen-binding fragment thereof comprising that sequence retains the ability to bind to same antigen as the parent (e.g., cancer associated antigen). In some embodiments, a total of 1 to 10 amino acids have been substituted, inserted and/or deleted in the amino acid sequence SEQ ID NO: 304. In some embodiments, the substitutions, insertions, or deletions occur in regions outside the CDRs (e.g., in the FRs). Optionally, the antibody or antigen-binding fragment thereof comprises the VL sequence SEQ ID NO: 304, including one or more post-translational modifications of that sequence. In a particular embodiment, the VL comprises one, two or three CDRs selected from: a. CDR-L1, comprising the amino acid sequence SEQ ID NO: 846, b. CDR-L2, comprising the amino acid sequence SEQ ID NO: 1388, and c. CDR-L3, comprising the amino acid sequence SEQ ID NO: 1930.

[1090] In one aspect, an antibody or antigen-binding fragment thereof is provided, wherein the antibody or antigen-binding fragment thereof comprises a VH as in any of the embodiments provided above, and a VL as in any of the embodiments provided above. In some embodiments, the antibody or antigen-binding fragment thereof comprises the VH amino acid sequence of SEQ ID NO: 33, and the VL amino acid sequence of SEQ ID NO: 304, optionally including post-translational modifications of those sequences.

### TBRE1021

[1091] In one aspect, the present disclosure provides an antibody or antigen-binding fragment thereof comprising at least one or both variable regions selected from: a. VH comprising the amino acid sequence of SEQ ID NO: 34 and b. VL comprising the amino acid sequence of SEQ ID NO: 305.

[1092] In one aspect, the present disclosure provides an antibody or antigen-binding fragment thereof comprising at least one, two, three, four, five, or six CDRs selected from: a. CDR-H1 comprising the amino acid sequence of SEQ ID NO: 576, b. CDR-H2 comprising the amino acid sequence of SEQ ID NO: 1118, c. CDR-H3 comprising the amino acid sequence of SEQ ID NO: 1660, d. CDR-L1 comprising the amino acid sequence of SEQ ID NO: 847, e. CDR-L2 comprising the amino acid sequence of SEQ ID NO: 1389, and f. CDR-L3 comprising the amino acid sequence of SEQ ID NO: 1931.

[1093] In one aspect, the present disclosure provides an antibody or antigen-binding fragment thereof comprising: a. CDR-H1 comprising the amino acid sequence of SEQ ID NO: 576, b. CDR-H2 comprising the amino acid sequence of SEQ ID NO: 1118, c. CDR-H3 comprising the amino acid sequence of SEQ ID NO: 1660, d. CDR-L1 comprising the amino acid sequence of SEQ ID NO: 847, e. CDR-L2 comprising the amino acid sequence of SEQ ID NO: 1389, and f. CDR-L3 comprising the amino acid sequence of SEQ ID NO: 1931. In one aspect, the present disclosure provides an antibody or antigen-binding fragment thereof comprising a CDR-H3 comprising the amino acid sequence of SEQ ID NO: 1660, and a CDR-L3 comprising the amino acid sequence of SEQ ID NO: 1931.

[1094] In one aspect, the present disclosure provides an antibody or antigen-binding fragment thereof comprising at least one, at least two, or all three VH CDR sequences selected from: a. CDR-H1 comprising the amino acid sequence of SEQ ID NO: 576, b. CDR-H2 comprising the amino acid sequence of SEQ ID NO: 1118, c. CDR-H3 comprising the amino acid sequence of SEQ ID NO: 1660, and a VL comprising the amino acid sequence of SEQ ID NO: 305.

[1095] In one aspect, the present disclosure provides an antibody or antigen-binding fragment thereof comprising at least one, at least two, or all three VL CDR sequences selected from: a. CDR-L1 comprising the amino acid sequence of SEQ ID NO: 847, b. CDR-L2 comprising the amino acid sequence of SEQ ID NO: 1389, c. CDR-L3 comprising the amino acid sequence of SEQ ID NO: 1931, and a VH comprising the amino acid sequence of SEQ ID NO: 34.

[1096] In one aspect, an antibody or antigen-binding fragment thereof is provided, wherein the antibody or antigen-binding fragment thereof comprises a heavy chain variable domain (VH) having at least 90%, 91%, 92%, 93%, 94%, 95%, 96%, 97%, 98%, 99%, or 100% sequence identity to the amino acid sequence SEQ ID NO: 34. In some embodiments, a VH sequence having at least 90%, 91%, 92%, 93%, 94%, 95%, 96%, 97%, 98%, or 99% identity contains substitutions (e.g., conservative substitutions), insertions, or deletions relative to the reference sequence, but an antibody or antigen-binding fragment thereof comprising that sequence retains the ability to bind to same antigen as of the parent (e.g., cancer associated antigen). In some embodiments, a total of 1 to 10 amino acids have been substituted, inserted and/or deleted in the amino acid sequence SEQ ID NO: 34. In some embodiments, substitutions, insertions, or deletions occur in regions outside the CDRs (e.g., in the FRs). Optionally, the antibody or antigen-binding fragment thereof comprises the VH sequence SEQ ID NO: 34, including one or more post-translational modifications of that sequence. In a particular embodiment, the VH comprises one, two or three CDRs selected from: a. CDR-H1, comprising the amino acid sequence SEQ ID NO: 576, b. CDR-H2, comprising the amino acid sequence SEQ ID NO: 1118, and c. CDR-H3, comprising the amino acid sequence SEQ ID NO: 1660.

[1097] In one aspect, an antibody or antigen-binding fragment thereof is provided, wherein the antibody or antigen-binding fragment thereof comprises a light chain variable domain (VL) having at least 90%, 91%, 92%, 93%, 94%, 95%, 96%, 97%, 98%, 99%, or 100% sequence identity to the amino acid sequence SEQ ID NO: 305. In some embodiments, a VL sequence having at least 90%, 91%, 92%, 93%, 94%, 95%, 96%, 97%, 98%, or 99% identity contains substitutions (e.g., conservative substitutions), insertions, or deletions relative to the reference sequence, but an antibody or antigen-binding fragment thereof comprising that sequence retains the ability to bind to same antigen as the parent (e.g., cancer associated antigen). In some embodiments, a total of 1 to 10 amino acids have been substituted, inserted and/or deleted in the amino acid sequence SEQ ID NO: 305. In some embodiments, the substitutions, insertions, or deletions occur in regions outside the CDRs (e.g., in the FRs). Optionally, the antibody or antigen-binding fragment thereof comprises the VL sequence SEQ ID NO: 305, including one or more post-translational modifications of that sequence. In a particular embodiment, the VL comprises one, two or three CDRs selected from: a. CDR-L1, comprising the amino acid sequence SEQ ID NO: 847, b. CDR-L2, comprising the amino acid sequence SEQ ID NO: 1389, and c. CDR-L3, comprising the amino acid sequence SEQ ID NO: 1931.

[1098] In one aspect, an antibody or antigen-binding fragment thereof is provided, wherein the antibody or antigen-binding fragment thereof comprises a VH as in any of the embodiments provided above, and a VL as in any of the embodiments provided above. In some embodiments, the antibody or antigen-binding fragment thereof comprises the VH amino acid sequence of SEQ ID NO: 34, and the VL amino acid sequence of SEQ ID NO: 305, optionally including post-translational modifications of those sequences.

### TBRE1022

[1099] In one aspect, the present disclosure provides an antibody or antigen-binding fragment thereof comprising at least one or both variable regions selected from: a. VH comprising the amino acid sequence of SEQ ID NO: 35 and b. VL comprising the amino acid sequence of SEQ ID NO: 306.

[1100] In one aspect, the present disclosure provides an antibody or antigen-binding fragment thereof comprising at least one, two, three, four, five, or six CDRs selected from: a. CDR-H1 comprising the amino acid sequence of SEQ ID NO: 577, b. CDR-H2 comprising the amino acid sequence of SEQ ID NO: 1119, c. CDR-H3 comprising the amino acid sequence of SEQ ID NO: 1661, d. CDR-L1 comprising the amino acid sequence of SEQ ID NO: 848, e. CDR-L2 comprising the amino acid sequence of SEQ ID NO: 1390, and f. CDR-L3 comprising the amino acid sequence of SEQ ID NO: 1932.

[1101] In one aspect, the present disclosure provides an antibody or antigen-binding fragment thereof comprising: a. CDR-H1 comprising the amino acid sequence of SEQ ID NO: 577, b. CDR-H2 comprising the amino acid sequence of SEQ ID NO: 1119, c. CDR-H3 comprising the amino acid sequence of SEQ ID NO: 1661, d. CDR-L1 comprising the amino acid sequence of SEQ ID NO: 848, e. CDR-L2 comprising the amino acid sequence of SEQ ID NO: 1390, and f. CDR-L3 comprising the amino acid sequence of SEQ ID NO: 1932. In one aspect, the present disclosure provides an antibody or antigen-binding fragment thereof comprising a CDR-H3 comprising the amino acid sequence of SEQ ID NO: 1661, and a CDR-L3 comprising the amino acid sequence of SEQ ID NO: 1932.

[1102] In one aspect, the present disclosure provides an antibody or antigen-binding fragment thereof comprising at least one, at least two, or all three VH CDR sequences selected from: a. CDR-H1 comprising the amino acid sequence of SEQ ID NO: 577, b. CDR-H2 comprising the amino acid sequence of SEQ ID NO: 1119, c. CDR-H3 comprising the amino acid sequence of SEQ ID NO: 1661, and a. VL comprising the amino acid sequence of SEQ ID NO: 306.

[1103] In one aspect, the present disclosure provides an antibody or antigen-binding fragment thereof comprising at least one, at least two, or all three VL CDR sequences selected from: a. CDR-L1 comprising the amino acid sequence of SEQ ID NO: 848, b. CDR-L2 comprising the amino acid sequence of SEQ ID NO: 1390, c. CDR-L3 comprising the amino acid sequence of SEQ ID NO: 1932, and a VH comprising the amino acid sequence of SEQ ID NO: 35.

[1104] In one aspect, an antibody or antigen-binding fragment thereof is provided, wherein the antibody or antigen-binding fragment thereof comprises a heavy chain variable domain (VH) having at least 90%, 91%, 92%, 93%, 94%, 95%, 96%, 97%, 98%, 99%, or 100% sequence identity to the amino acid sequence SEQ ID NO: 35. In some embodiments, a VH sequence having at least 90%, 91%, 92%, 93%, 94%, 95%, 96%, 97%, 98%, or 99% identity contains substitutions (e.g., conservative substitutions), insertions, or deletions relative to the reference sequence, but an antibody or antigen-binding fragment thereof comprising that sequence retains the ability to bind to same antigen as of the parent (e.g., cancer associated antigen). In some embodiments, a total of 1 to 10 amino acids have been substituted, inserted and/or deleted in the amino acid sequence SEQ ID NO: 35. In some embodiments, substitutions, insertions, or deletions occur in regions outside the CDRs (e.g., in the FRs). Optionally, the antibody or antigen-binding fragment thereof comprises the VH sequence SEQ ID NO: 35, including one or more post-translational modifications of that sequence. In a particular embodiment, the VH comprises one, two or three CDRs selected from: a. CDR-H1, comprising the amino acid sequence SEQ ID NO: 577, b. CDR-H2, comprising the amino acid sequence SEQ ID NO: 1119, and c. CDR-H3, comprising the amino acid sequence SEQ ID NO: 1661.

[1105] In one aspect, an antibody or antigen-binding fragment thereof is provided, wherein the antibody or antigen-binding fragment thereof comprises a light chain variable domain (VL) having at least 90%, 91%, 92%, 93%, 94%, 95%, 96%, 97%, 98%, 99%, or 100% sequence identity to the amino acid sequence SEQ ID NO: 306. In some embodiments, a VL sequence having at least 90%, 91%, 92%, 93%, 94%, 95%, 96%, 97%, 98%, or 99% identity contains substitutions (e.g., conservative substitutions), insertions, or deletions relative to the reference sequence, but an antibody or antigen-binding fragment thereof comprising that sequence retains the ability to bind to same antigen as the parent (e.g., cancer associated antigen). In some embodiments, a total of 1 to 10 amino acids have been substituted, inserted and/or deleted in the amino acid sequence SEQ ID NO: 306. In some embodiments, the substitutions, insertions, or deletions occur in regions outside the CDRs (e.g., in the FRs). Optionally, the antibody or antigen-binding fragment thereof comprises the VL sequence SEQ ID NO: 306, including one or more post-translational modifications of that sequence. In a particular embodiment, the VL comprises one, two or three CDRs selected from: a. CDR-L1, comprising the amino acid sequence SEQ ID NO: 848, b. CDR-L2, comprising the amino acid sequence SEQ ID NO: 1390, and c. CDR-L3, comprising the amino acid sequence SEQ ID NO: 1932.

[1106] In one aspect, an antibody or antigen-binding fragment thereof is provided, wherein the antibody or antigen-binding fragment thereof comprises a VH as in any of the embodiments provided above, and a VL as in any of the embodiments provided above. In some embodiments, the antibody or antigen-binding fragment thereof comprises the VH amino acid sequence of SEQ ID NO: 35, and the VL amino acid sequence of SEQ ID NO: 306, optionally including post-translational modifications of those sequences.

### TBRE1023

[1107] In one aspect, the present disclosure provides an antibody or antigen-binding fragment thereof comprising at least one or both variable regions selected from: a. VH comprising the amino acid sequence of SEQ ID NO: 36 and b. VL comprising the amino acid sequence of SEQ ID NO: 307.

[1108] In one aspect, the present disclosure provides an antibody or antigen-binding fragment thereof comprising at least one, two, three, four, five, or six CDRs selected from: a. CDR-H1 comprising the amino acid sequence of SEQ ID NO: 578, b. CDR-H2 comprising the amino acid sequence of SEQ ID NO: 1120, c. CDR-H3 comprising the amino acid sequence of SEQ ID NO: 1662, d. CDR-L1 comprising the amino acid sequence of SEQ ID NO: 849, e. CDR-L2 comprising the amino acid sequence of SEQ ID NO: 1391, and f. CDR-L3 comprising the amino acid sequence of SEQ ID NO: 1933.

[1109] In one aspect, the present disclosure provides an antibody or antigen-binding fragment thereof comprising: a. CDR-H1 comprising the amino acid sequence of SEQ ID NO: 578, b. CDR-H2 comprising the amino acid sequence of SEQ ID NO: 1120, c. CDR-H3 comprising the amino acid sequence of SEQ ID NO: 1662, d. CDR-L1 comprising the amino acid sequence of SEQ ID NO: 849, e. CDR-L2 comprising the amino acid sequence of SEQ ID NO: 1391, and f. CDR-L3 comprising the amino acid sequence of SEQ ID NO: 1933. In one aspect, the present disclosure provides an antibody or antigen-binding fragment thereof comprising a CDR-H3 comprising the amino acid sequence of SEQ ID NO: 1662, and a CDR-L3 comprising the amino acid sequence of SEQ ID NO: 1933.

[1110] In one aspect, the present disclosure provides an antibody or antigen-binding fragment thereof comprising at least one, at least two, or all three VH CDR sequences selected from: a. CDR-H1 comprising the amino acid sequence of SEQ ID NO: 578, b. CDR-H2 comprising the amino acid sequence of SEQ ID NO: 1120, c. CDR-H3 comprising the amino acid sequence of SEQ ID NO: 1662, and a VL comprising the amino acid sequence of SEQ ID NO: 307.

[1111] In one aspect, the present disclosure provides an antibody or antigen-binding fragment thereof comprising at least one, at least two, or all three VL CDR sequences selected from: a. CDR-L1 comprising the amino acid sequence of SEQ ID NO: 849, b. CDR-L2 comprising the amino acid sequence of SEQ ID NO: 1391, c. CDR-L3 comprising the amino acid sequence of SEQ ID NO: 1933, and a VH comprising the amino acid sequence of SEQ ID NO: 36.

[1112] In one aspect, an antibody or antigen-binding fragment thereof is provided, wherein the antibody or antigen-binding fragment thereof comprises a heavy chain variable domain (VH) having at least 90%, 91%, 92%, 93%, 94%, 95%, 96%, 97%, 98%, 99%, or 100% sequence identity to the amino acid sequence SEQ ID NO: 36. In some embodiments, a VH sequence having at least 90%, 91%, 92%, 93%, 94%, 95%, 96%, 97%, 98%, or 99% identity contains substitutions (e.g., conservative substitutions), insertions, or deletions relative to the reference sequence, but an antibody or antigen-binding fragment thereof comprising that sequence retains the ability to bind to same antigen as of the parent (e.g., cancer associated antigen). In some embodiments, a total of 1 to 10 amino acids have been substituted, inserted and/or deleted in the amino acid sequence SEQ ID NO: 36. In some embodiments, substitutions, insertions, or deletions occur in regions outside the CDRs (e.g., in the FRs). Optionally, the antibody or antigen-binding fragment thereof comprises the VH sequence SEQ ID NO: 36, including one or more post-translational modifications of that sequence. In a particular embodiment, the VH comprises one, two or three CDRs selected from: a. CDR-H1, comprising the amino acid sequence SEQ ID NO: 578, b. CDR-H2, comprising the amino acid sequence SEQ ID NO: 1120, and c. CDR-H3, comprising the amino acid sequence SEQ ID NO: 1662.

[1113] In one aspect, an antibody or antigen-binding fragment thereof is provided, wherein the antibody or antigen-binding fragment thereof comprises a light chain variable domain (VL) having at least 90%, 91%, 92%, 93%, 94%, 95%, 96%, 97%, 98%, 99%, or 100% sequence identity to the amino acid sequence SEQ ID NO: 307. In some embodiments, a VL sequence having at least 90%, 91%, 92%, 93%, 94%, 95%, 96%, 97%, 98%, or 99% identity contains substitutions (e.g., conservative substitutions), insertions, or deletions relative to the reference sequence, but an antibody or antigen-binding fragment thereof comprising that sequence retains the ability to bind to same antigen as the parent (e.g., cancer associated antigen). In some embodiments, a total of 1 to 10 amino acids have been substituted, inserted and/or deleted in the amino acid sequence SEQ ID NO: 307. In some embodiments, the substitutions, insertions, or deletions occur in regions outside the CDRs (e.g., in the FRs). Optionally, the antibody or antigen-binding fragment thereof comprises the VL sequence SEQ ID NO: 307, including one or more post-translational modifications of that sequence. In a particular embodiment, the VL comprises one, two or three CDRs selected from: a. CDR-L1, comprising the amino acid sequence SEQ ID NO: 849, b. CDR-L2, comprising the amino acid sequence SEQ ID NO: 1391, and c. CDR-L3, comprising the amino acid sequence SEQ ID NO: 1933.

[1114] In one aspect, an antibody or antigen-binding fragment thereof is provided, wherein the antibody or antigen-binding fragment thereof comprises a VH as in any of the embodiments provided above, and a VL as in any of the embodiments provided above. In some embodiments, the antibody or antigen-binding fragment thereof comprises the VH amino acid sequence of SEQ ID NO: 36, and the VL amino acid sequence of SEQ ID NO: 307, optionally including post-translational modifications of those sequences.

### TBRE1024

[1115] In one aspect, the present disclosure provides an antibody or antigen-binding fragment thereof comprising at least one or both variable regions selected from: a. VH comprising the amino acid sequence of SEQ ID NO: 37 and b. VL comprising the amino acid sequence of SEQ ID NO: 308.

[1116] In one aspect, the present disclosure provides an antibody or antigen-binding fragment thereof comprising at least one, two, three, four, five, or six CDRs selected from: a. CDR-H1 comprising the amino acid sequence of SEQ ID NO: 579, b. CDR-H2 comprising the amino acid sequence of SEQ ID NO: 1121, c. CDR-H3 comprising the amino acid sequence of SEQ ID NO: 1663, d. CDR-L1 comprising the amino acid sequence of SEQ ID NO: 850, e. CDR-L2 comprising the amino acid sequence of SEQ ID NO: 1392, and f. CDR-L3 comprising the amino acid sequence of SEQ ID NO: 1934.

[1117] In one aspect, the present disclosure provides an antibody or antigen-binding fragment thereof comprising: a. CDR-H1 comprising the amino acid sequence of SEQ ID NO: 579, b. CDR-H2 comprising the amino acid sequence of SEQ ID NO: 1121, c. CDR-H3 comprising the amino acid sequence of SEQ ID NO: 1663, d. CDR-L1 comprising the amino acid sequence of SEQ ID NO: 850, e. CDR-L2 comprising the amino acid sequence of SEQ ID NO: 1392, and f. CDR-L3 comprising the amino acid sequence of SEQ ID NO: 1934. In one aspect, the present disclosure provides an antibody or antigen-binding fragment thereof comprising a CDR-H3 comprising the amino acid sequence of SEQ ID NO: 1663, and a CDR-L3 comprising the amino acid sequence of SEQ ID NO: 1934.

[1118] In one aspect, the present disclosure provides an antibody or antigen-binding fragment thereof comprising at least one, at least two, or all three VH CDR sequences selected from: a. CDR-H1 comprising the amino acid sequence of SEQ ID NO: 579, b. CDR-H2 comprising the amino acid sequence of SEQ ID NO: 1121, c. CDR-H3 comprising the amino acid sequence of SEQ ID NO: 1663, and a VL comprising the amino acid sequence of SEQ ID NO: 308.

[1119] In one aspect, the present disclosure provides an antibody or antigen-binding fragment thereof comprising at least one, at least two, or all three VL CDR sequences selected from: a. CDR-L1 comprising the amino acid sequence of SEQ ID NO: 850, b. CDR-L2 comprising the amino acid sequence of SEQ ID NO: 1392, c. CDR-L3 comprising the amino acid sequence of SEQ ID NO: 1934, and a VH comprising the amino acid sequence of SEQ ID NO: 37.

[1120] In one aspect, an antibody or antigen-binding fragment thereof is provided, wherein the antibody or antigen-binding fragment thereof comprises a heavy chain variable domain (VH) having at least 90%, 91%, 92%, 93%, 94%, 95%, 96%, 97%, 98%, 99%, or 100% sequence identity to the amino acid sequence SEQ ID NO: 37. In some embodiments, a VH sequence having at least 90%, 91%, 92%, 93%, 94%, 95%, 96%, 97%, 98%, or 99% identity contains substitutions (e.g., conservative substitutions), insertions, or deletions relative to the reference sequence, but an antibody or antigen-binding fragment thereof comprising that sequence retains the ability to bind to same antigen as of the parent (e.g., cancer associated antigen). In some embodiments, a total of 1 to 10 amino acids have been substituted, inserted and/or deleted in the amino acid sequence SEQ ID NO: 37. In some embodiments, substitutions, insertions, or deletions occur in regions outside the CDRs (e.g., in the FRs). Optionally, the antibody or antigen-binding fragment thereof comprises the VH sequence SEQ ID NO: 37, including one or more post-translational modifications of that sequence. In a particular embodiment, the VH comprises one, two or three CDRs selected from: a. CDR-H1, comprising the amino acid sequence SEQ ID NO: 579, b. CDR-H2, comprising the amino acid sequence SEQ ID NO: 1121, and c. CDR-H3, comprising the amino acid sequence SEQ ID NO: 1663.

[1121] In one aspect, an antibody or antigen-binding fragment thereof is provided, wherein the antibody or antigen-binding fragment thereof comprises a light chain variable domain (VL) having at least 90%, 91%, 92%, 93%, 94%, 95%, 96%, 97%, 98%, 99%, or 100% sequence identity to the amino acid sequence SEQ ID NO: 308. In some embodiments, a VL sequence having at least 90%, 91%, 92%, 93%, 94%, 95%, 96%, 97%, 98%, or 99% identity contains substitutions (e.g., conservative substitutions), insertions, or deletions relative to the reference sequence, but an antibody or antigen-binding fragment thereof comprising that sequence retains the ability to bind to same antigen as the parent (e.g., cancer associated antigen). In some embodiments, a total of 1 to 10 amino acids have been substituted, inserted and/or deleted in the amino acid sequence SEQ ID NO: 308. In some embodiments, the substitutions, insertions, or deletions occur in regions outside the CDRs (e.g., in the FRs). Optionally, the antibody or antigen-binding fragment thereof comprises the VL sequence SEQ ID NO: 308, including one or more post-translational modifications of that sequence. In a particular embodiment, the VL comprises one, two or three CDRs selected from: a. CDR-L1, comprising the amino acid sequence SEQ ID NO: 850, b. CDR-L2, comprising the amino acid sequence SEQ ID NO: 1392, and c. CDR-L3, comprising the amino acid sequence SEQ ID NO: 1934.

[1122] In one aspect, an antibody or antigen-binding fragment thereof is provided, wherein the antibody or antigen-binding fragment thereof comprises a VH as in any of the embodiments provided above, and a VL as in any of the embodiments provided above. In some embodiments, the antibody or antigen-binding fragment thereof comprises the VH amino acid sequence of SEQ ID NO: 37, and the VL amino acid sequence of SEQ ID NO: 308, optionally including post-translational modifications of those sequences.

### TBRE1025

[1123] In one aspect, the present disclosure provides an antibody or antigen-binding fragment thereof comprising at least one or both variable regions selected from: a. VH comprising the amino acid sequence of SEQ ID NO: 38 and b. VL comprising the amino acid sequence of SEQ ID NO: 309.

[1124] In one aspect, the present disclosure provides an antibody or antigen-binding fragment thereof comprising at least one, two, three, four, five, or six CDRs selected from: a. CDR-H1 comprising the amino acid sequence of SEQ ID NO: 580, b. CDR-H2 comprising the amino acid sequence of SEQ ID NO: 1122, c. CDR-H3 comprising the amino acid sequence of SEQ ID NO: 1664, d. CDR-L1 comprising the amino acid sequence of SEQ ID NO: 851, e. CDR-L2 comprising the amino acid sequence of SEQ ID NO: 1393, and f. CDR-L3 comprising the amino acid sequence of SEQ ID NO: 1935.

[1125] In one aspect, the present disclosure provides an antibody or antigen-binding fragment thereof comprising: a. CDR-H1 comprising the amino acid sequence of SEQ ID NO: 580, b. CDR-H2 comprising the amino acid sequence of SEQ ID NO: 1122, c. CDR-H3 comprising the amino acid sequence of SEQ ID NO: 1664, d. CDR-L1 comprising the amino acid sequence of SEQ ID NO: 851, e. CDR-L2 comprising the amino acid sequence of SEQ ID NO: 1393, and f. CDR-L3 comprising the amino acid sequence of SEQ ID NO: 1935. In one aspect, the present disclosure provides an antibody or antigen-binding fragment thereof comprising a CDR-H3 comprising the amino acid sequence of SEQ ID NO: 1664, and a CDR-L3 comprising the amino acid sequence of SEQ ID NO: 1935.

[1126] In one aspect, the present disclosure provides an antibody or antigen-binding fragment thereof comprising at least one, at least two, or all three VH CDR sequences selected from: a. CDR-H1 comprising the amino acid sequence of SEQ ID NO: 580, b. CDR-H2 comprising the amino acid sequence of SEQ ID NO: 1122, c. CDR-H3 comprising the amino acid sequence of SEQ ID NO: 1664, and a VL comprising the amino acid sequence of SEQ ID NO: 309.

[1127] In one aspect, the present disclosure provides an antibody or antigen-binding fragment thereof comprising at least one, at least two, or all three VL CDR sequences selected from: a. CDR-L1 comprising the amino acid sequence of SEQ ID NO: 851, b. CDR-L2 comprising the amino acid sequence of SEQ ID NO: 1393, c. CDR-L3 comprising the amino acid sequence of SEQ ID NO: 1935, and a VH comprising the amino acid sequence of SEQ ID NO: 38.

[1128] In one aspect, an antibody or antigen-binding fragment thereof is provided, wherein the antibody or antigen-binding fragment thereof comprises a heavy chain variable domain (VH) having at least 90%, 91%, 92%, 93%, 94%, 95%, 96%, 97%, 98%, 99%, or 100% sequence identity to the amino acid sequence SEQ ID NO: 38. In some embodiments, a VH sequence having at least 90%, 91%, 92%, 93%, 94%, 95%, 96%, 97%, 98%, or 99% identity contains substitutions (e.g., conservative substitutions), insertions, or deletions relative to the reference sequence, but an antibody or antigen-binding fragment thereof comprising that sequence retains the ability to bind to same antigen as of the parent (e.g., cancer associated antigen). In some embodiments, a total of 1 to 10 amino acids have been substituted, inserted and/or deleted in the amino acid sequence SEQ ID NO: 38. In some embodiments, substitutions, insertions, or deletions occur in regions outside the CDRs (e.g., in the FRs). Optionally, the antibody or antigen-binding fragment thereof comprises the VH sequence SEQ ID NO: 38, including one or more post-translational modifications of that sequence. In a particular embodiment, the VH comprises one, two or three CDRs selected from: a. CDR-H1, comprising the amino acid sequence SEQ ID NO: 580, b. CDR-H2, comprising the amino acid sequence SEQ ID NO: 1122, and c. CDR-H3, comprising the amino acid sequence SEQ ID NO: 1664.

[1129] In one aspect, an antibody or antigen-binding fragment thereof is provided, wherein the antibody or antigen-binding fragment thereof comprises a light chain variable domain (VL) having at least 90%, 91%, 92%, 93%, 94%, 95%, 96%, 97%, 98%, 99%, or 100% sequence identity to the amino acid sequence SEQ ID NO: 309. In some embodiments, a VL sequence having at least 90%, 91%, 92%, 93%, 94%, 95%, 96%, 97%, 98%, or 99% identity contains substitutions (e.g., conservative substitutions), insertions, or deletions relative to the reference sequence, but an antibody or antigen-binding fragment thereof comprising that sequence retains the ability to bind to same antigen as the parent (e.g., cancer associated antigen). In some embodiments, a total of 1 to 10 amino acids have been substituted, inserted and/or deleted in the amino acid sequence SEQ ID NO: 309. In some embodiments, the substitutions, insertions, or deletions occur in regions outside the CDRs (e.g., in the FRs). Optionally, the antibody or antigen-binding fragment thereof comprises the VL sequence SEQ ID NO: 309, including one or more post-translational modifications of that sequence. In a particular embodiment, the VL comprises one, two or three CDRs selected from: a. CDR-L1, comprising the amino acid sequence SEQ ID NO: 851, b. CDR-L2, comprising the amino acid sequence SEQ ID NO: 1393, and c. CDR-L3, comprising the amino acid sequence SEQ ID NO: 1935.

[1130] In one aspect, an antibody or antigen-binding fragment thereof is provided, wherein the antibody or antigen-binding fragment thereof comprises a VH as in any of the embodiments provided above, and a VL as in any of the embodiments provided above. In some embodiments, the antibody or antigen-binding fragment thereof comprises the VH amino acid sequence of SEQ ID NO: 38, and the VL amino acid sequence of SEQ ID NO: 309, optionally including post-translational modifications of those sequences.

### TBRE1026

[1131] In one aspect, the present disclosure provides an antibody or antigen-binding fragment thereof comprising at least one or both variable regions selected from: a. VH comprising the amino acid sequence of SEQ ID NO: 39 and b. VL comprising the amino acid sequence of SEQ ID NO: 310.

[1132] In one aspect, the present disclosure provides an antibody or antigen-binding fragment thereof comprising at least one, two, three, four, five, or six CDRs selected from: a. CDR-H1 comprising the amino acid sequence of SEQ ID NO: 581, b. CDR-H2 comprising the amino acid sequence of SEQ ID NO: 1123, c. CDR-H3 comprising the amino acid sequence of SEQ ID NO: 1665, d. CDR-L1 comprising the amino acid sequence of SEQ ID NO: 852, e. CDR-L2 comprising the amino acid sequence of SEQ ID NO: 1394, and f. CDR-L3 comprising the amino acid sequence of SEQ ID NO: 1936.

[1133] In one aspect, the present disclosure provides an antibody or antigen-binding fragment thereof comprising a. CDR-H1 comprising the amino acid sequence of SEQ ID NO: 581, b. CDR-H2 comprising the amino acid sequence of SEQ ID NO: 1123, c. CDR-H3 comprising the amino acid sequence of SEQ ID NO: 1665, d. CDR-L1 comprising the amino acid sequence of SEQ ID NO: 852, e. CDR-L2 comprising the amino acid sequence of SEQ ID NO: 1394, and f. CDR-L3 comprising the amino acid sequence of SEQ ID NO: 1936. In one aspect, the present disclosure provides an antibody or antigen-binding fragment thereof comprising a CDR-H3 comprising the amino acid sequence of SEQ ID NO: 1665, and a CDR-L3 comprising the amino acid sequence of SEQ ID NO: 1936.

[1134] In one aspect, the present disclosure provides an antibody or antigen-binding fragment thereof comprising at least one, at least two, or all three VH CDR sequences selected from: a. CDR-H1 comprising the amino acid sequence of SEQ ID NO: 581, b. CDR-H2 comprising the amino acid sequence of SEQ ID NO: 1123, c. CDR-H3 comprising the amino acid sequence of SEQ ID NO: 1665, and a VL comprising the amino acid sequence of SEQ ID NO: 310.

[1135] In one aspect, the present disclosure provides an antibody or antigen-binding fragment thereof comprising at least one, at least two, or all three VL CDR sequences selected from: a. CDR-L1 comprising the amino acid sequence of SEQ ID NO: 852, b. CDR-L2 comprising the amino acid sequence of SEQ ID NO: 1394, c. CDR-L3 comprising the amino acid sequence of SEQ ID NO: 1936, and a VH comprising the amino acid sequence of SEQ ID NO: 39.

[1136] In one aspect, an antibody or antigen-binding fragment thereof is provided, wherein the antibody or antigen-binding fragment thereof comprises a heavy chain variable domain (VH) having at least 90%, 91%, 92%, 93%, 94%, 95%, 96%, 97%, 98%, 99%, or 100% sequence identity to the amino acid sequence SEQ ID NO: 39. In some embodiments, a VH sequence having at least 90%, 91%, 92%, 93%, 94%, 95%, 96%, 97%, 98%, or 99% identity contains substitutions (e.g., conservative substitutions), insertions, or deletions relative to the reference sequence, but an antibody or antigen-binding fragment thereof comprising that sequence retains the ability to bind to same antigen as of the parent (e.g., cancer associated antigen). In some embodiments, a total of 1 to 10 amino acids have been substituted, inserted and/or deleted in the amino acid sequence SEQ ID NO: 39. In some embodiments, substitutions, insertions, or deletions occur in regions outside the CDRs (e.g., in the FRs). Optionally, the antibody or antigen-binding fragment thereof comprises the VH sequence SEQ ID NO: 39, including one or more post-translational modifications of that sequence. In a particular embodiment, the VH comprises one, two or three CDRs selected from: a. CDR-H1, comprising the amino acid sequence SEQ ID NO: 581, b. CDR-H2, comprising the amino acid sequence SEQ ID NO: 1123, and c. CDR-H3, comprising the amino acid sequence SEQ ID NO: 1665.

[1137] In one aspect, an antibody or antigen-binding fragment thereof is provided, wherein the antibody or antigen-binding fragment thereof comprises a light chain variable domain (VL) having at least 90%, 91%, 92%, 93%, 94%, 95%, 96%, 97%, 98%, 99%, or 100% sequence identity to the amino acid sequence SEQ ID NO: 310. In some embodiments, a VL sequence having at least 90%, 91%, 92%, 93%, 94%, 95%, 96%, 97%, 98%, or 99% identity contains substitutions (e.g., conservative substitutions), insertions, or deletions relative to the reference sequence, but an antibody or antigen-binding fragment thereof comprising that sequence retains the ability to bind to same antigen as the parent (e.g., cancer associated antigen). In some embodiments, a total of 1 to 10 amino acids have been substituted, inserted and/or deleted in the amino acid sequence SEQ ID NO: 310. In some embodiments, the substitutions, insertions, or deletions occur in regions outside the CDRs (e.g., in the FRs). Optionally, the antibody or antigen-binding fragment thereof comprises the VL sequence SEQ ID NO: 310, including one or more post-translational modifications of that sequence. In a particular embodiment, the VL comprises one, two or three CDRs selected from: a. CDR-L1, comprising the amino acid sequence SEQ ID NO: 852, b. CDR-L2, comprising the amino acid sequence SEQ ID NO: 1394, and c. CDR-L3, comprising the amino acid sequence SEQ ID NO: 1936.

[1138] In one aspect, an antibody or antigen-binding fragment thereof is provided, wherein the antibody or antigen-binding fragment thereof comprises a VH as in any of the embodiments provided above, and a VL as in any of the embodiments provided above. In some embodiments, the antibody or antigen-binding fragment thereof comprises the VH amino acid sequence of SEQ ID NO: 39, and the VL amino acid sequence of SEQ ID NO: 310, optionally including post-translational modifications of those sequences.

### TBRE1027

[1139] In one aspect, the present disclosure provides an antibody or antigen-binding fragment thereof comprising at least one or both variable regions selected from: a. VH comprising the amino acid sequence of SEQ ID NO: 40 and b. VL comprising the amino acid sequence of SEQ ID NO: 311.

[1140] In one aspect, the present disclosure provides an antibody or antigen-binding fragment thereof comprising at least one, two, three, four, five, or six CDRs selected from: a. CDR-H1 comprising the amino acid sequence of SEQ ID NO: 582, b. CDR-H2 comprising the amino acid sequence of SEQ ID NO: 1124, c. CDR-H3 comprising the amino acid sequence of SEQ ID NO: 1666, d. CDR-L1 comprising the amino acid sequence of SEQ ID NO: 853, e. CDR-L2 comprising the amino acid sequence of SEQ ID NO: 1395, and f. CDR-L3 comprising the amino acid sequence of SEQ ID NO: 1937.

[1141] In one aspect, the present disclosure provides an antibody or antigen-binding fragment thereof comprising: a. CDR-H1 comprising the amino acid sequence of SEQ ID NO: 582, b. CDR-H2 comprising the amino acid sequence of SEQ ID NO: 1124, c. CDR-H3 comprising the amino acid sequence of SEQ ID NO: 1666, d. CDR-L1 comprising the amino acid sequence of SEQ ID NO: 853, e. CDR-L2 comprising the amino acid sequence of SEQ ID NO: 1395, and f. CDR-L3 comprising the amino acid sequence of SEQ ID NO: 1937. In one aspect, the present disclosure provides an antibody or antigen-binding fragment thereof comprising a CDR-H3 comprising the amino acid sequence of SEQ ID NO: 1666, and a CDR-L3 comprising the amino acid sequence of SEQ ID NO: 1937.

[1142] In one aspect, the present disclosure provides an antibody or antigen-binding fragment thereof comprising at least one, at least two, or all three VH CDR sequences selected from: a. CDR-H1 comprising the amino acid sequence of SEQ ID NO: 582, b. CDR-H2 comprising the amino acid sequence of SEQ ID NO: 1124, c. CDR-H3 comprising the amino acid sequence of SEQ ID NO: 1666, and a. VL comprising the amino acid sequence of SEQ ID NO: 311.

[1143] In one aspect, the present disclosure provides an antibody or antigen-binding fragment thereof comprising at least one, at least two, or all three VL CDR sequences selected from: a. CDR-L1 comprising the amino acid sequence of SEQ ID NO: 853, b. CDR-L2 comprising the amino acid sequence of SEQ ID NO: 1395, c. CDR-L3 comprising the amino acid sequence of SEQ ID NO: 1937, and a VH comprising the amino acid sequence of SEQ ID NO: 40.

[1144] In one aspect, an antibody or antigen-binding fragment thereof is provided, wherein the antibody or antigen-binding fragment thereof comprises a heavy chain variable domain (VH) having at least 90%, 91%, 92%, 93%, 94%, 95%, 96%, 97%, 98%, 99%, or 100% sequence identity to the amino acid sequence SEQ ID NO: 40. In some embodiments, a VH sequence having at least 90%, 91%, 92%, 93%, 94%, 95%, 96%, 97%, 98%, or 99% identity contains substitutions (e.g., conservative substitutions), insertions, or deletions relative to the reference sequence, but an antibody or antigen-binding fragment thereof comprising that sequence retains the ability to bind to same antigen as of the parent (e.g., cancer associated antigen). In some embodiments, a total of 1 to 10 amino acids have been substituted, inserted and/or deleted in the amino acid sequence SEQ ID NO: 40. In some embodiments, substitutions, insertions, or deletions occur in regions outside the CDRs (e.g., in the FRs). Optionally, the antibody or antigen-binding fragment thereof comprises the VH sequence SEQ ID NO: 40, including one or more post-translational modifications of that sequence. In a particular embodiment, the VH comprises one, two or three CDRs selected from: a. CDR-H1, comprising the amino acid sequence SEQ ID NO: 582, b. CDR-H2, comprising the amino acid sequence SEQ ID NO: 1124, and c. CDR-H3, comprising the amino acid sequence SEQ ID NO: 1666.

[1145] In one aspect, an antibody or antigen-binding fragment thereof is provided, wherein the antibody or antigen-binding fragment thereof comprises a light chain variable domain (VL) having at least 90%, 91%, 92%, 93%, 94%, 95%, 96%, 97%, 98%, 99%, or 100% sequence identity to the amino acid sequence SEQ ID NO: 311. In some embodiments, a VL sequence having at least 90%, 91%, 92%, 93%, 94%, 95%, 96%, 97%, 98%, or 99% identity contains substitutions (e.g., conservative substitutions), insertions, or deletions relative to the reference sequence, but an antibody or antigen-binding fragment thereof comprising that sequence retains the ability to bind to same antigen as the parent (e.g., cancer associated antigen). In some embodiments, a total of 1 to 10 amino acids have been substituted, inserted and/or deleted in the amino acid sequence SEQ ID NO: 311. In some embodiments, the substitutions, insertions, or deletions occur in regions outside the CDRs (e.g., in the FRs). Optionally, the antibody or antigen-binding fragment thereof comprises the VL sequence SEQ ID NO: 311, including one or more post-translational modifications of that sequence. In a particular embodiment, the VL comprises one, two or three CDRs selected from: a. CDR-L1, comprising the amino acid sequence SEQ ID NO: 853, b. CDR-L2, comprising the amino acid sequence SEQ ID NO: 1395, and c. CDR-L3, comprising the amino acid sequence SEQ ID NO: 1937.

[1146] In one aspect, an antibody or antigen-binding fragment thereof is provided, wherein the antibody or antigen-binding fragment thereof comprises a VH as in any of the embodiments provided above, and a VL as in any of the embodiments provided above. In some embodiments, the antibody or antigen-binding fragment thereof comprises the VH amino acid sequence of SEQ ID NO: 40, and the VL amino acid sequence of SEQ ID NO: 311, optionally including post-translational modifications of those sequences.

### TBRE1028

[1147] In one aspect, the present disclosure provides an antibody or antigen-binding fragment thereof comprising at least one or both variable regions selected from: a. VH comprising the amino acid sequence of SEQ ID NO: 41 and b. VL comprising the amino acid sequence of SEQ ID NO: 312.

[1148] In one aspect, the present disclosure provides an antibody or antigen-binding fragment thereof comprising at least one, two, three, four, five, or six CDRs selected from: a. CDR-H1 comprising the amino acid sequence of SEQ ID NO: 583, b. CDR-H2 comprising the amino acid sequence of SEQ ID NO: 1125, c. CDR-H3 comprising the amino acid sequence of SEQ ID NO: 1667, d. CDR-L1 comprising the amino acid sequence of SEQ ID NO: 854, e. CDR-L2 comprising the amino acid sequence of SEQ ID NO: 1396, and f. CDR-L3 comprising the amino acid sequence of SEQ ID NO: 1938.

[1149] In one aspect, the present disclosure provides an antibody or antigen-binding fragment thereof comprising: a. CDR-H1 comprising the amino acid sequence of SEQ ID NO: 583, b. CDR-H2 comprising the amino acid sequence of SEQ ID NO: 1125, c. CDR-H3 comprising the amino acid sequence of SEQ ID NO: 1667, d. CDR-L1 comprising the amino acid sequence of SEQ ID NO: 854, e. CDR-L2 comprising the amino acid sequence of SEQ ID NO: 1396, and f. CDR-L3 comprising the amino acid sequence of SEQ ID NO: 1938. In one aspect, the present disclosure provides an antibody or antigen-binding fragment thereof comprising a CDR-H3 comprising the amino acid sequence of SEQ ID NO: 1667, and a CDR-L3 comprising the amino acid sequence of SEQ ID NO: 1938.

[1150] In one aspect, the present disclosure provides an antibody or antigen-binding fragment thereof comprising at least one, at least two, or all three VH CDR sequences selected from: a. CDR-H1 comprising the amino acid sequence of SEQ ID NO: 583, b. CDR-H2 comprising the amino acid sequence of SEQ ID NO: 1125, c. CDR-H3 comprising the amino acid sequence of SEQ ID NO: 1667, and a VL comprising the amino acid sequence of SEQ ID NO: 312.

[1151] In one aspect, the present disclosure provides an antibody or antigen-binding fragment thereof comprising at least one, at least two, or all three VL CDR sequences selected from: a. CDR-L1 comprising the amino acid sequence of SEQ ID NO: 854, b. CDR-L2 comprising the amino acid sequence of SEQ ID NO: 1396, c. CDR-L3 comprising the amino acid sequence of SEQ ID NO: 1938, and a VH comprising the amino acid sequence of SEQ ID NO: 41.

[1152] In one aspect, an antibody or antigen-binding fragment thereof is provided, wherein the antibody or antigen-binding fragment thereof comprises a heavy chain variable domain (VH) having at least 90%, 91%, 92%, 93%, 94%, 95%, 96%, 97%, 98%, 99%, or 100% sequence identity to the amino acid sequence SEQ ID NO: 41. In some embodiments, a VH sequence having at least 90%, 91%, 92%, 93%, 94%, 95%, 96%, 97%, 98%, or 99% identity contains substitutions (e.g., conservative substitutions), insertions, or deletions relative to the reference sequence, but an antibody or antigen-binding fragment thereof comprising that sequence retains the ability to bind to same antigen as of the parent (e.g., cancer associated antigen). In some embodiments, a total of 1 to 10 amino acids have been substituted, inserted and/or deleted in the amino acid sequence SEQ ID NO: 41. In some embodiments, substitutions, insertions, or deletions occur in regions outside the CDRs (e.g., in the FRs). Optionally, the antibody or antigen-binding fragment thereof comprises the VH sequence SEQ ID NO: 41, including one or more post-translational modifications of that sequence. In a particular embodiment, the VH comprises one, two or three CDRs selected from: a. CDR-H1, comprising the amino acid sequence SEQ ID NO: 583, b. CDR-H2, comprising the amino acid sequence SEQ ID NO: 1125, and c. CDR-H3, comprising the amino acid sequence SEQ ID NO: 1667.

[1153] In one aspect, an antibody or antigen-binding fragment thereof is provided, wherein the antibody or antigen-binding fragment thereof comprises a light chain variable domain (VL) having at least 90%, 91%, 92%, 93%, 94%, 95%, 96%, 97%, 98%, 99%, or 100% sequence identity to the amino acid sequence SEQ ID NO: 312. In some embodiments, a VL sequence having at least 90%, 91%, 92%, 93%, 94%, 95%, 96%, 97%, 98%, or 99% identity contains substitutions (e.g., conservative substitutions), insertions, or deletions relative to the reference sequence, but an antibody or antigen-binding fragment thereof comprising that sequence retains the ability to bind to same antigen as the parent (e.g., cancer associated antigen). In some embodiments, a total of 1 to 10 amino acids have been substituted, inserted and/or deleted in the amino acid sequence SEQ ID NO: 312. In some embodiments, the substitutions, insertions, or deletions occur in regions outside the CDRs (e.g., in the FRs). Optionally, the antibody or antigen-binding fragment thereof comprises the VL sequence SEQ ID NO: 312, including one or more post-translational modifications of that sequence. In a particular embodiment, the VL comprises one, two or three CDRs selected from: a. CDR-L1, comprising the amino acid sequence SEQ ID NO: 854, b. CDR-L2, comprising the amino acid sequence SEQ ID NO: 1396, and c. CDR-L3, comprising the amino acid sequence SEQ ID NO: 1938.

[1154] In one aspect, an antibody or antigen-binding fragment thereof is provided, wherein the antibody or antigen-binding fragment thereof comprises a VH as in any of the embodiments provided above, and a VL as in any of the embodiments provided above. In some embodiments, the antibody or antigen-binding fragment thereof comprises the VH amino acid sequence of SEQ ID NO: 41, and the VL amino acid sequence of SEQ ID NO: 312, optionally including post-translational modifications of those sequences.

### TBRE1029

[1155] In one aspect, the present disclosure provides an antibody or antigen-binding fragment thereof comprising at least one or both variable regions selected from: a. VH comprising the amino acid sequence of SEQ ID NO: 42 and b. VL comprising the amino acid sequence of SEQ ID NO: 313.

[1156] In one aspect, the present disclosure provides an antibody or antigen-binding fragment thereof comprising at least one, two, three, four, five, or six CDRs selected from: a. CDR-H1 comprising the amino acid sequence of SEQ ID NO: 584, b. CDR-H2 comprising the amino acid sequence of SEQ ID NO: 1126, c. CDR-H3 comprising the amino acid sequence of SEQ ID NO: 1668, d. CDR-L1 comprising the amino acid sequence of SEQ ID NO: 855, e. CDR-L2 comprising the amino acid sequence of SEQ ID NO: 1397, and f. CDR-L3 comprising the amino acid sequence of SEQ ID NO: 1939.

[1157] In one aspect, the present disclosure provides an antibody or antigen-binding fragment thereof comprising: a. CDR-H1 comprising the amino acid sequence of SEQ ID NO: 584, b. CDR-H2 comprising the amino acid sequence of SEQ ID NO: 1126, c. CDR-H3 comprising the amino acid sequence of SEQ ID NO: 1668, d. CDR-L1 comprising the amino acid sequence of SEQ ID NO: 855, e. CDR-L2 comprising the amino acid sequence of SEQ ID NO: 1397, and f. CDR-L3 comprising the amino acid sequence of SEQ ID NO: 1939. In one aspect, the present disclosure provides an antibody or antigen-binding fragment thereof comprising a CDR-H3 comprising the amino acid sequence of SEQ ID NO: 1668, and a CDR-L3 comprising the amino acid sequence of SEQ ID NO: 1939.

[1158] In one aspect, the present disclosure provides an antibody or antigen-binding fragment thereof comprising at least one, at least two, or all three VH CDR sequences selected from: a. CDR-H1 comprising the amino acid sequence of SEQ ID NO: 584, b. CDR-H2 comprising the amino acid sequence of SEQ ID NO: 1126, c. CDR-H3 comprising the amino acid sequence of SEQ ID NO: 1668, and a VL comprising the amino acid sequence of SEQ ID NO: 313.

[1159] In one aspect, the present disclosure provides an antibody or antigen-binding fragment thereof comprising at least one, at least two, or all three VL CDR sequences selected from: a. CDR-L1 comprising the amino acid sequence of SEQ ID NO: 855, b. CDR-L2 comprising the amino acid sequence of SEQ ID NO: 1397, c. CDR-L3 comprising the amino acid sequence of SEQ ID NO: 1939, and a VH comprising the amino acid sequence of SEQ ID NO: 42.

[1160] In one aspect, an antibody or antigen-binding fragment thereof is provided, wherein the antibody or antigen-binding fragment thereof comprises a heavy chain variable domain (VH) having at least 90%, 91%, 92%, 93%, 94%, 95%, 96%, 97%, 98%, 99%, or 100% sequence identity to the amino acid sequence SEQ ID NO: 42. In some embodiments, a VH sequence having at least 90%, 91%, 92%, 93%, 94%, 95%, 96%, 97%, 98%, or 99% identity contains substitutions (e.g., conservative substitutions), insertions, or deletions relative to the reference sequence, but an antibody or antigen-binding fragment thereof comprising that sequence retains the ability to bind to same antigen as of the parent (e.g., cancer associated antigen). In some embodiments, a total of 1 to 10 amino acids have been substituted, inserted and/or deleted in the amino acid sequence SEQ ID NO: 42. In some embodiments, substitutions, insertions, or deletions occur in regions outside the CDRs (e.g., in the FRs). Optionally, the antibody or antigen-binding fragment thereof comprises the VH sequence SEQ ID NO: 42, including one or more post-translational modifications of that sequence. In a particular embodiment, the VH comprises one, two or three CDRs selected from: a. CDR-H1, comprising the amino acid sequence SEQ ID NO: 584, b. CDR-H2, comprising the amino acid sequence SEQ ID NO: 1126, and c. CDR-H3, comprising the amino acid sequence SEQ ID NO: 1668.

[1161] In one aspect, an antibody or antigen-binding fragment thereof is provided, wherein the antibody or antigen-binding fragment thereof comprises a light chain variable domain (VL) having at least 90%, 91%, 92%, 93%, 94%, 95%, 96%, 97%, 98%, 99%, or 100% sequence identity to the amino acid sequence SEQ ID NO: 313. In some embodiments, a VL sequence having at least 90%, 91%, 92%, 93%, 94%, 95%, 96%, 97%, 98%, or 99% identity contains substitutions (e.g., conservative substitutions), insertions, or deletions relative to the reference sequence, but an antibody or antigen-binding fragment thereof comprising that sequence retains the ability to bind to same antigen as the parent (e.g., cancer associated antigen). In some embodiments, a total of 1 to 10 amino acids have been substituted, inserted and/or deleted in the amino acid sequence SEQ ID NO: 313. In some embodiments, the substitutions, insertions, or deletions occur in regions outside the CDRs (e.g., in the FRs). Optionally, the antibody or antigen-binding fragment thereof comprises the VL sequence SEQ ID NO: 313, including one or more post-translational modifications of that sequence. In a particular embodiment, the VL comprises one, two or three CDRs selected from: a. CDR-L1, comprising the amino acid sequence SEQ ID NO: 855, b. CDR-L2, comprising the amino acid sequence SEQ ID NO: 1397, and c. CDR-L3, comprising the amino acid sequence SEQ ID NO: 1939.

[1162] In one aspect, an antibody or antigen-binding fragment thereof is provided, wherein the antibody or antigen-binding fragment thereof comprises a VH as in any of the embodiments provided above, and a VL as in any of the embodiments provided above. In some embodiments, the antibody or antigen-binding fragment thereof comprises the VH amino acid sequence of SEQ ID NO: 42, and the VL amino acid sequence of SEQ ID NO: 313, optionally including post-translational modifications of those sequences.

### TBRE1030

[1163] In one aspect, the present disclosure provides an antibody or antigen-binding fragment thereof comprising at least one or both variable regions selected from: a. VH comprising the amino acid sequence of SEQ ID NO: 43 and b. VL comprising the amino acid sequence of SEQ ID NO: 314.

[1164] In one aspect, the present disclosure provides an antibody or antigen-binding fragment thereof comprising at least one, two, three, four, five, or six CDRs selected from: a. CDR-H1 comprising the amino acid sequence of SEQ ID NO: 585, b. CDR-H2 comprising the amino acid sequence of SEQ ID NO: 1127, c. CDR-H3 comprising the amino acid sequence of SEQ ID NO: 1669, d. CDR-L1 comprising the amino acid sequence of SEQ ID NO: 856, e. CDR-L2 comprising the amino acid sequence of SEQ ID NO: 1398, and f. CDR-L3 comprising the amino acid sequence of SEQ ID NO: 1940.

[1165] In one aspect, the present disclosure provides an antibody or antigen-binding fragment thereof comprising: a. CDR-H1 comprising the amino acid sequence of SEQ ID NO: 585, b. CDR-H2 comprising the amino acid sequence of SEQ ID NO: 1127, c. CDR-H3 comprising the amino acid sequence of SEQ ID NO: 1669, d. CDR-L1 comprising the amino acid sequence of SEQ ID NO: 856, e. CDR-L2 comprising the amino acid sequence of SEQ ID NO: 1398, and f. CDR-L3 comprising the amino acid sequence of SEQ ID NO: 1940. In one aspect, the present disclosure provides an antibody or antigen-binding fragment thereof comprising a CDR-H3 comprising the amino acid sequence of SEQ ID NO: 1669, and a CDR-L3 comprising the amino acid sequence of SEQ ID NO: 1940.

[1166] In one aspect, the present disclosure provides an antibody or antigen-binding fragment thereof comprising at least one, at least two, or all three VH CDR sequences selected from: a. CDR-H1 comprising the amino acid sequence of SEQ ID NO: 585, b. CDR-H2 comprising the amino acid sequence of SEQ ID NO: 1127, c. CDR-H3 comprising the amino acid sequence of SEQ ID NO: 1669, and a VL comprising the amino acid sequence of SEQ ID NO: 314.

[1167] In one aspect, the present disclosure provides an antibody or antigen-binding fragment thereof comprising at least one, at least two, or all three VL CDR sequences selected from: a. CDR-L1 comprising the amino acid sequence of SEQ ID NO: 856, b. CDR-L2 comprising the amino acid sequence of SEQ ID NO: 1398, c. CDR-L3 comprising the amino acid sequence of SEQ ID NO: 1940, and a VH comprising the amino acid sequence of SEQ ID NO: 43.

[1168] In one aspect, an antibody or antigen-binding fragment thereof is provided, wherein the antibody or antigen-binding fragment thereof comprises a heavy chain variable domain (VH) having at least 90%, 91%, 92%, 93%, 94%, 95%, 96%, 97%, 98%, 99%, or 100% sequence identity to the amino acid sequence SEQ ID NO: 43. In some embodiments, a VH sequence having at least 90%, 91%, 92%, 93%, 94%, 95%, 96%, 97%, 98%, or 99% identity contains substitutions (e.g., conservative substitutions), insertions, or deletions relative to the reference sequence, but an antibody or antigen-binding fragment thereof comprising that sequence retains the ability to bind to same antigen as of the parent (e.g., cancer associated antigen). In some embodiments, a total of 1 to 10 amino acids have been substituted, inserted and/or deleted in the amino acid sequence SEQ ID NO: 43. In some embodiments, substitutions, insertions, or deletions occur in regions outside the CDRs (e.g., in the FRs). Optionally, the antibody or antigen-binding fragment thereof comprises the VH sequence SEQ ID NO: 43, including one or more post-translational modifications of that sequence. In a particular embodiment, the VH comprises one, two or three CDRs selected from: a. CDR-H1, comprising the amino acid sequence SEQ ID NO: 585, b. CDR-H2, comprising the amino acid sequence SEQ ID NO: 1127, and a CDR-H3, comprising the amino acid sequence SEQ ID NO: 1669.

[1169] In one aspect, an antibody or antigen-binding fragment thereof is provided, wherein the antibody or antigen-binding fragment thereof comprises a light chain variable domain (VL) having at least 90%, 91%, 92%, 93%, 94%, 95%, 96%, 97%, 98%, 99%, or 100% sequence identity to the amino acid sequence SEQ ID NO: 314. In some embodiments, a VL sequence having at least 90%, 91%, 92%, 93%, 94%, 95%, 96%, 97%, 98%, or 99% identity contains substitutions (e.g., conservative substitutions), insertions, or deletions relative to the reference sequence, but an antibody or antigen-binding fragment thereof comprising that sequence retains the ability to bind to same antigen as the parent (e.g., cancer associated antigen). In some embodiments, a total of 1 to 10 amino acids have been substituted, inserted and/or deleted in the amino acid sequence SEQ ID NO: 314. In some embodiments, the substitutions, insertions, or deletions occur in regions outside the CDRs (e.g., in the FRs). Optionally, the antibody or antigen-binding fragment thereof comprises the VL sequence SEQ ID NO: 314, including one or more post-translational modifications of that sequence. In a particular embodiment, the VL comprises one, two or three CDRs selected from: a. CDR-L1, comprising the amino acid sequence SEQ ID NO: 856, b. CDR-L2, comprising the amino acid sequence SEQ ID NO: 1398, and c. CDR-L3, comprising the amino acid sequence SEQ ID NO: 1940.

[1170] In one aspect, an antibody or antigen-binding fragment thereof is provided, wherein the antibody or antigen-binding fragment thereof comprises a VH as in any of the embodiments provided above, and a VL as in any of the embodiments provided above. In some embodiments, the antibody or antigen-binding fragment thereof comprises the VH amino acid sequence of SEQ ID NO: 43, and the VL amino acid sequence of SEQ ID NO: 314, optionally including post-translational modifications of those sequences.

### TBRE1031

[1171] In one aspect, the present disclosure provides an antibody or antigen-binding fragment thereof comprising at least one or both variable regions selected from: a. VH comprising the amino acid sequence of SEQ ID NO: 44 and b. VL comprising the amino acid sequence of SEQ ID NO: 315.

[1172] In one aspect, the present disclosure provides an antibody or antigen-binding fragment thereof comprising at least one, two, three, four, five, or six CDRs selected from: a. CDR-H1 comprising the amino acid sequence of SEQ ID NO: 586, b. CDR-H2 comprising the amino acid sequence of SEQ ID NO: 1128, c. CDR-H3 comprising the amino acid sequence of SEQ ID NO: 1670, d. CDR-L1 comprising the amino acid sequence of SEQ ID NO: 857, e. CDR-L2 comprising the amino acid sequence of SEQ ID NO: 1399, and f. CDR-L3 comprising the amino acid sequence of SEQ ID NO: 1941.

[1173] In one aspect, the present disclosure provides an antibody or antigen-binding fragment thereof comprising: a. CDR-H1 comprising the amino acid sequence of SEQ ID NO: 586, b. CDR-H2 comprising the amino acid sequence of SEQ ID NO: 1128, c. CDR-H3 comprising the amino acid sequence of SEQ ID NO: 1670, d. CDR-L1 comprising the amino acid sequence of SEQ ID NO: 857, e. CDR-L2 comprising the amino acid sequence of SEQ ID NO: 1399, and f. CDR-L3 comprising the amino acid sequence of SEQ ID NO: 1941. In one aspect, the present disclosure provides an antibody or antigen-binding fragment thereof comprising a CDR-H3 comprising the amino acid sequence of SEQ ID NO: 1670, and a CDR-L3 comprising the amino acid sequence of SEQ ID NO: 1941.

[1174] In one aspect, the present disclosure provides an antibody or antigen-binding fragment thereof comprising at least one, at least two, or all three VH CDR sequences selected from: a. CDR-H1 comprising the amino acid sequence of SEQ ID NO: 586, b. CDR-H2 comprising the amino acid sequence of SEQ ID NO: 1128, c. CDR-H3 comprising the amino acid sequence of SEQ ID NO: 1670, and a VL comprising the amino acid sequence of SEQ ID NO: 315.

[1175] In one aspect, the present disclosure provides an antibody or antigen-binding fragment thereof comprising at least one, at least two, or all three VL CDR sequences selected from: a. CDR-L1 comprising the amino acid sequence of SEQ ID NO: 857, b. CDR-L2 comprising the amino acid sequence of SEQ ID NO: 1399, c. CDR-L3 comprising the amino acid sequence of SEQ ID NO: 1941, and a VH comprising the amino acid sequence of SEQ ID NO: 44.

[1176] In one aspect, an antibody or antigen-binding fragment thereof is provided, wherein the antibody or antigen-binding fragment thereof comprises a heavy chain variable domain (VH) having at least 90%, 91%, 92%, 93%, 94%, 95%, 96%, 97%, 98%, 99%, or 100% sequence identity to the amino acid sequence SEQ ID NO: 44. In some embodiments, a VH sequence having at least 90%, 91%, 92%, 93%, 94%, 95%, 96%, 97%, 98%, or 99% identity contains substitutions (e.g., conservative substitutions), insertions, or deletions relative to the reference sequence, but an antibody or antigen-binding fragment thereof comprising that sequence retains the ability to bind to same antigen as of the parent (e.g., cancer associated antigen). In some embodiments, a total of 1 to 10 amino acids have been substituted, inserted and/or deleted in the amino acid sequence SEQ ID NO: 44. In some embodiments, substitutions, insertions, or deletions occur in regions outside the CDRs (e.g., in the FRs). Optionally, the antibody or antigen-binding fragment thereof comprises the VH sequence SEQ ID NO: 44, including one or more post-translational modifications of that sequence. In a particular embodiment, the VH comprises one, two or three CDRs selected from: a. CDR-H1, comprising the amino acid sequence SEQ ID NO: 586, b. CDR-H2, comprising the amino acid sequence SEQ ID NO: 1128, and c. CDR-H3, comprising the amino acid sequence SEQ ID NO: 1670.

[1177] In one aspect, an antibody or antigen-binding fragment thereof is provided, wherein the antibody or antigen-binding fragment thereof comprises a light chain variable domain (VL) having at least 90%, 91%, 92%, 93%, 94%, 95%, 96%, 97%, 98%, 99%, or 100% sequence identity to the amino acid sequence SEQ ID NO: 315. In some embodiments, a VL sequence having at least 90%, 91%, 92%, 93%, 94%, 95%, 96%, 97%, 98%, or 99% identity contains substitutions (e.g., conservative substitutions), insertions, or deletions relative to the reference sequence, but an antibody or antigen-binding fragment thereof comprising that sequence retains the ability to bind to same antigen as the parent (e.g., cancer associated antigen). In some embodiments, a total of 1 to 10 amino acids have been substituted, inserted and/or deleted in the amino acid sequence SEQ ID NO: 315. In some embodiments, the substitutions, insertions, or deletions occur in regions outside the CDRs (e.g., in the FRs). Optionally, the antibody or antigen-binding fragment thereof comprises the VL sequence SEQ ID NO: 315, including one or more post-translational modifications of that sequence. In a particular embodiment, the VL comprises one, two or three CDRs selected from: a. CDR-L1, comprising the amino acid sequence SEQ ID NO: 857, b. CDR-L2, comprising the amino acid sequence SEQ ID NO: 1399, and c. CDR-L3, comprising the amino acid sequence SEQ ID NO: 1941.

[1178] In one aspect, an antibody or antigen-binding fragment thereof is provided, wherein the antibody or antigen-binding fragment thereof comprises a VH as in any of the embodiments provided above, and a VL as in any of the embodiments provided above. In some embodiments, the antibody or antigen-binding fragment thereof comprises the VH amino acid sequence of SEQ ID NO: 44, and the VL amino acid sequence of SEQ ID NO: 315, optionally including post-translational modifications of those sequences.

### TBRE1032

[1179] In one aspect, the present disclosure provides an antibody or antigen-binding fragment thereof comprising at least one or both variable regions selected from: a. VH comprising the amino acid sequence of SEQ ID NO: 45 and b. VL comprising the amino acid sequence of SEQ ID NO: 316.

[1180] In one aspect, the present disclosure provides an antibody or antigen-binding fragment thereof comprising at least one, two, three, four, five, or six CDRs selected from: a. CDR-H1 comprising the amino acid sequence of SEQ ID NO: 587, b. CDR-H2 comprising the amino acid sequence of SEQ ID NO: 1129, c. CDR-H3 comprising the amino acid sequence of SEQ ID NO: 1671, d. CDR-L1 comprising the amino acid sequence of SEQ ID NO: 858, e. CDR-L2 comprising the amino acid sequence of SEQ ID NO: 1400, and f. CDR-L3 comprising the amino acid sequence of SEQ ID NO: 1942.

[1181] In one aspect, the present disclosure provides an antibody or antigen-binding fragment thereof comprising: a. CDR-H1 comprising the amino acid sequence of SEQ ID NO: 587, b. CDR-H2 comprising the amino acid sequence of SEQ ID NO: 1129, c. CDR-H3 comprising the amino acid sequence of SEQ ID NO: 1671, d. CDR-L1 comprising the amino acid sequence of SEQ ID NO: 858, e. CDR-L2 comprising the amino acid sequence of SEQ ID NO: 1400, and f. CDR-L3 comprising the amino acid sequence of SEQ ID NO: 1942. In one aspect, the present disclosure provides an antibody or antigen-binding fragment thereof comprising a CDR-H3 comprising the amino acid sequence of SEQ ID NO: 1671, and a CDR-L3 comprising the amino acid sequence of SEQ ID NO: 1942.

[1182] In one aspect, the present disclosure provides an antibody or antigen-binding fragment thereof comprising at least one, at least two, or all three VH CDR sequences selected from: a. CDR-H1 comprising the amino acid sequence of SEQ ID NO: 587, b. CDR-H2 comprising the amino acid sequence of SEQ ID NO: 1129, c. CDR-H3 comprising the amino acid sequence of SEQ ID NO: 1671, and a VL comprising the amino acid sequence of SEQ ID NO: 316.

[1183] In one aspect, the present disclosure provides an antibody or antigen-binding fragment thereof comprising at least one, at least two, or all three VL CDR sequences selected from: a. CDR-L1 comprising the amino acid sequence of SEQ ID NO: 858, b. CDR-L2 comprising the amino acid sequence of SEQ ID NO: 1400, c. CDR-L3 comprising the amino acid sequence of SEQ ID NO: 1942, and VH comprising the amino acid sequence of SEQ ID NO: 45.

[1184] In one aspect, an antibody or antigen-binding fragment thereof is provided, wherein the antibody or antigen-binding fragment thereof comprises a heavy chain variable domain (VH) having at least 90%, 91%, 92%, 93%, 94%, 95%, 96%, 97%, 98%, 99%, or 100% sequence identity to the amino acid sequence SEQ ID NO: 45. In some embodiments, a VH sequence having at least 90%, 91%, 92%, 93%, 94%, 95%, 96%, 97%, 98%, or 99% identity contains substitutions (e.g., conservative substitutions), insertions, or deletions relative to the reference sequence, but an antibody or antigen-binding fragment thereof comprising that sequence retains the ability to bind to same antigen as of the parent (e.g., cancer associated antigen). In some embodiments, a total of 1 to 10 amino acids have been substituted, inserted and/or deleted in the amino acid sequence SEQ ID NO: 45. In some embodiments, substitutions, insertions, or deletions occur in regions outside the CDRs (e.g., in the FRs). Optionally, the antibody or antigen-binding fragment thereof comprises the VH sequence SEQ ID NO: 45, including one or more post-translational modifications of that sequence. In a particular embodiment, the VH comprises one, two or three CDRs selected from: a. CDR-H1, comprising the amino acid sequence SEQ ID NO: 587, b. CDR-H2, comprising the amino acid sequence SEQ ID NO: 1129, and c. CDR-H3, comprising the amino acid sequence SEQ ID NO: 1671.

[1185] In one aspect, an antibody or antigen-binding fragment thereof is provided, wherein the antibody or antigen-binding fragment thereof comprises a light chain variable domain (VL) having at least 90%, 91%, 92%, 93%, 94%, 95%, 96%, 97%, 98%, 99%, or 100% sequence identity to the amino acid sequence SEQ ID NO: 316. In some embodiments, a VL sequence having at least 90%, 91%, 92%, 93%, 94%, 95%, 96%, 97%, 98%, or 99% identity contains substitutions (e.g., conservative substitutions), insertions, or deletions relative to the reference sequence, but an antibody or antigen-binding fragment thereof comprising that sequence retains the ability to bind to same antigen as the parent (e.g., cancer associated antigen). In some embodiments, a total of 1 to 10 amino acids have been substituted, inserted and/or deleted in the amino acid sequence SEQ ID NO: 316. In some embodiments, the substitutions, insertions, or deletions occur in regions outside the CDRs (e.g., in the FRs). Optionally, the antibody or antigen-binding fragment thereof comprises the VL sequence SEQ ID NO: 316, including one or more post-translational modifications of that sequence. In a particular embodiment, the VL comprises one, two or three CDRs selected from: a. CDR-L1, comprising the amino acid sequence SEQ ID NO: 858, b. CDR-L2, comprising the amino acid sequence SEQ ID NO: 1400, and c. CDR-L3, comprising the amino acid sequence SEQ ID NO: 1942.

[1186] In one aspect, an antibody or antigen-binding fragment thereof is provided, wherein the antibody or antigen-binding fragment thereof comprises a VH as in any of the embodiments provided above, and a VL as in any of the embodiments provided above. In some embodiments, the antibody or antigen-binding fragment thereof comprises the VH amino acid sequence of SEQ ID NO: 45, and the VL amino acid sequence of SEQ ID NO: 316, optionally including post-translational modifications of those sequences.

### TBRE1033

[1187] In one aspect, the present disclosure provides an antibody or antigen-binding fragment thereof comprising at least one or both variable regions selected from: a. VH comprising the amino acid sequence of SEQ ID NO: 46 and b. VL comprising the amino acid sequence of SEQ ID NO: 317.

[1188] In one aspect, the present disclosure provides an antibody or antigen-binding fragment thereof comprising at least one, two, three, four, five, or six CDRs selected from: a. CDR-H1 comprising the amino acid sequence of SEQ ID NO: 588, b. CDR-H2 comprising the amino acid sequence of SEQ ID NO: 1130, c. CDR-H3 comprising the amino acid sequence of SEQ ID NO: 1672, d. CDR-L1 comprising the amino acid sequence of SEQ ID NO: 859, e. CDR-L2 comprising the amino acid sequence of SEQ ID NO: 1401, and f. CDR-L3 comprising the amino acid sequence of SEQ ID NO: 1943.

[1189] In one aspect, the present disclosure provides an antibody or antigen-binding fragment thereof comprising: a. CDR-H1 comprising the amino acid sequence of SEQ ID NO: 588, b. CDR-H2 comprising the amino acid sequence of SEQ ID NO: 1130, c. CDR-H3 comprising the amino acid sequence of SEQ ID NO: 1672, d. CDR-L1 comprising the amino acid sequence of SEQ ID NO: 859, e. CDR-L2 comprising the amino acid sequence of SEQ ID NO: 1401, and f. CDR-L3 comprising the amino acid sequence of SEQ ID NO: 1943. In one aspect, the present disclosure provides an antibody or antigen-binding fragment thereof comprising a CDR-H3 comprising the amino acid sequence of SEQ ID NO: 1672, and a CDR-L3 comprising the amino acid sequence of SEQ ID NO: 1943.

[1190] In one aspect, the present disclosure provides an antibody or antigen-binding fragment thereof comprising at least one, at least two, or all three VH CDR sequences selected from: a. CDR-H1 comprising the amino acid sequence of SEQ ID NO: 588, b. CDR-H2 comprising the amino acid sequence of SEQ ID NO: 1130, c. CDR-H3 comprising the amino acid sequence of SEQ ID NO: 1672, and a VL comprising the amino acid sequence of SEQ ID NO: 317.

[1191] In one aspect, the present disclosure provides an antibody or antigen-binding fragment thereof comprising at least one, at least two, or all three VL CDR sequences selected from: a. CDR-L1 comprising the amino acid sequence of SEQ ID NO: 859, b. CDR-L2 comprising the amino acid sequence of SEQ ID NO: 1401, c. CDR-L3 comprising the amino acid sequence of SEQ ID NO: 1943, and a VH comprising the amino acid sequence of SEQ ID NO: 46.

[1192] In one aspect, an antibody or antigen-binding fragment thereof is provided, wherein the antibody or antigen-binding fragment thereof comprises a heavy chain variable domain (VH) having at least 90%, 91%, 92%, 93%, 94%, 95%, 96%, 97%, 98%, 99%, or 100% sequence identity to the amino acid sequence SEQ ID NO: 46. In some embodiments, a VH sequence having at least 90%, 91%, 92%, 93%, 94%, 95%, 96%, 97%, 98%, or 99% identity contains substitutions (e.g., conservative substitutions), insertions, or deletions relative to the reference sequence, but an antibody or antigen-binding fragment thereof comprising that sequence retains the ability to bind to same antigen as of the parent (e.g., cancer associated antigen). In some embodiments, a total of 1 to 10 amino acids have been substituted, inserted and/or deleted in the amino acid sequence SEQ ID NO: 46. In some embodiments, substitutions, insertions, or deletions occur in regions outside the CDRs (e.g., in the FRs). Optionally, the antibody or antigen-binding fragment thereof comprises the VH sequence SEQ ID NO: 46, including one or more post-translational modifications of that sequence. In a particular embodiment, the VH comprises one, two or three CDRs selected from: a. CDR-H1, comprising the amino acid sequence SEQ ID NO: 588, b. CDR-H2, comprising the amino acid sequence SEQ ID NO: 1130, and c. CDR-H3, comprising the amino acid sequence SEQ ID NO: 1672.

[1193] In one aspect, an antibody or antigen-binding fragment thereof is provided, wherein the antibody or antigen-binding fragment thereof comprises a light chain variable domain (VL) having at least 90%, 91%, 92%, 93%, 94%, 95%, 96%, 97%, 98%, 99%, or 100% sequence identity to the amino acid sequence SEQ ID NO: 317. In some embodiments, a VL sequence having at least 90%, 91%, 92%, 93%, 94%, 95%, 96%, 97%, 98%, or 99% identity contains substitutions (e.g., conservative substitutions), insertions, or deletions relative to the reference sequence, but an antibody or antigen-binding fragment thereof comprising that sequence retains the ability to bind to same antigen as the parent (e.g., cancer associated antigen). In some embodiments, a total of 1 to 10 amino acids have been substituted, inserted and/or deleted in the amino acid sequence SEQ ID NO: 317. In some embodiments, the substitutions, insertions, or deletions occur in regions outside the CDRs (e.g., in the FRs). Optionally, the antibody or antigen-binding fragment thereof comprises the VL sequence SEQ ID NO: 317, including one or more post-translational modifications of that sequence. In a particular embodiment, the VL comprises one, two or three CDRs selected from: a. CDR-L1, comprising the amino acid sequence SEQ ID NO: 859, b. CDR-L2, comprising the amino acid sequence SEQ ID NO: 1401, and c. CDR-L3, comprising the amino acid sequence SEQ ID NO: 1943.

[1194] In one aspect, an antibody or antigen-binding fragment thereof is provided, wherein the antibody or antigen-binding fragment thereof comprises a VH as in any of the embodiments provided above, and a VL as in any of the embodiments provided above. In some embodiments, the antibody or antigen-binding fragment thereof comprises the VH amino acid sequence of SEQ ID NO: 46, and the VL amino acid sequence of SEQ ID NO: 317, optionally including post-translational modifications of those sequences.

### TBRE1034

[1195] In one aspect, the present disclosure provides an antibody or antigen-binding fragment thereof comprising at least one or both variable regions selected from: a. VH comprising the amino acid sequence of SEQ ID NO: 47 and b. VL comprising the amino acid sequence of SEQ ID NO: 318.

[1196] In one aspect, the present disclosure provides an antibody or antigen-binding fragment thereof comprising at least one, two, three, four, five, or six CDRs selected from: a. CDR-H1 comprising the amino acid sequence of SEQ ID NO: 589, b. CDR-H2 comprising the amino acid sequence of SEQ ID NO: 1131, c. CDR-H3 comprising the amino acid sequence of SEQ ID NO: 1673, d. CDR-L1 comprising the amino acid sequence of SEQ ID NO: 860, e. CDR-L2 comprising the amino acid sequence of SEQ ID NO: 1402, and f. CDR-L3 comprising the amino acid sequence of SEQ ID NO: 1944.

[1197] In one aspect, the present disclosure provides an antibody or antigen-binding fragment thereof comprising: a. CDR-H1 comprising the amino acid sequence of SEQ ID NO: 589, b. CDR-H2 comprising the amino acid sequence of SEQ ID NO: 1131, c. CDR-H3 comprising the amino acid sequence of SEQ ID NO: 1673, d. CDR-L1 comprising the amino acid sequence of SEQ ID NO: 860, e. CDR-L2 comprising the amino acid sequence of SEQ ID NO: 1402, and f. CDR-L3 comprising the amino acid sequence of SEQ ID NO: 1944. In one aspect, the present disclosure provides an antibody or antigen-binding fragment thereof comprising a CDR-H3 comprising the amino acid sequence of SEQ ID NO: 1673, and a CDR-L3 comprising the amino acid sequence of SEQ ID NO: 1944.

[1198] In one aspect, the present disclosure provides an antibody or antigen-binding fragment thereof comprising at least one, at least two, or all three VH CDR sequences selected from: a. CDR-H1 comprising the amino acid sequence of SEQ ID NO: 589, b. CDR-H2 comprising the amino acid sequence of SEQ ID NO: 1131, c. CDR-H3 comprising the amino acid sequence of SEQ ID NO: 1673, and a VL comprising the amino acid sequence of SEQ ID NO: 318.

[1199] In one aspect, the present disclosure provides an antibody or antigen-binding fragment thereof comprising at least one, at least two, or all three VL CDR sequences selected from: a. CDR-L1 comprising the amino acid sequence of SEQ ID NO: 860, b. CDR-L2 comprising the amino acid sequence of SEQ ID NO: 1402, c. CDR-L3 comprising the amino acid sequence of SEQ ID NO: 1944, and a VH comprising the amino acid sequence of SEQ ID NO: 47.

[1200] In one aspect, an antibody or antigen-binding fragment thereof is provided, wherein the antibody or antigen-binding fragment thereof comprises a heavy chain variable domain (VH) having at least 90%, 91%, 92%, 93%, 94%, 95%, 96%, 97%, 98%, 99%, or 100% sequence identity to the amino acid sequence SEQ ID NO: 47. In some embodiments, a VH sequence having at least 90%, 91%, 92%, 93%, 94%, 95%, 96%, 97%, 98%, or 99% identity contains substitutions (e.g., conservative substitutions), insertions, or deletions relative to the reference sequence, but an antibody or antigen-binding fragment thereof comprising that sequence retains the ability to bind to same antigen as of the parent (e.g., cancer associated antigen). In some embodiments, a total of 1 to 10 amino acids have been substituted, inserted and/or deleted in the amino acid sequence SEQ ID NO: 47. In some embodiments, substitutions, insertions, or deletions occur in regions outside the CDRs (e.g., in the FRs). Optionally, the antibody or antigen-binding fragment thereof comprises the VH sequence SEQ ID NO: 47, including one or more post-translational modifications of that sequence. In a particular embodiment, the VH comprises one, two or three CDRs selected from: a. CDR-H1, comprising the amino acid sequence SEQ ID NO: 589, b. CDR-H2, comprising the amino acid sequence SEQ ID NO: 1131, and c. CDR-H3, comprising the amino acid sequence SEQ ID NO: 1673.

[1201] In one aspect, an antibody or antigen-binding fragment thereof is provided, wherein the antibody or antigen-binding fragment thereof comprises a light chain variable domain (VL) having at least 90%, 91%, 92%, 93%, 94%, 95%, 96%, 97%, 98%, 99%, or 100% sequence identity to the amino acid sequence SEQ ID NO: 318. In some embodiments, a VL sequence having at least 90%, 91%, 92%, 93%, 94%, 95%, 96%, 97%, 98%, or 99% identity contains substitutions (e.g., conservative substitutions), insertions, or deletions relative to the reference sequence, but an antibody or antigen-binding fragment thereof comprising that sequence retains the ability to bind to same antigen as the parent (e.g., cancer associated antigen). In some embodiments, a total of 1 to 10 amino acids have been substituted, inserted and/or deleted in the amino acid sequence SEQ ID NO: 318. In some embodiments, the substitutions, insertions, or deletions occur in regions outside the CDRs (e.g., in the FRs). Optionally, the antibody or antigen-binding fragment thereof comprises the VL sequence SEQ ID NO: 318, including one or more post-translational modifications of that sequence. In a particular embodiment, the VL comprises one, two or three CDRs selected from: a. CDR-L1, comprising the amino acid sequence SEQ ID NO: 860, b. CDR-L2, comprising the amino acid sequence SEQ ID NO: 1402, and c. CDR-L3, comprising the amino acid sequence SEQ ID NO: 1944.

[1202] In one aspect, an antibody or antigen-binding fragment thereof is provided, wherein the antibody or antigen-binding fragment thereof comprises a VH as in any of the embodiments provided above, and a VL as in any of the embodiments provided above. In some embodiments, the antibody or antigen-binding fragment thereof comprises the VH amino acid sequence of SEQ ID NO: 47, and the VL amino acid sequence of SEQ ID NO: 318, optionally including post-translational modifications of those sequences.

### TBRE1035

[1203] In one aspect, the present disclosure provides an antibody or antigen-binding fragment thereof comprising at least one or both variable regions selected from: a. VH comprising the amino acid sequence of SEQ ID NO: 48 and b. VL comprising the amino acid sequence of SEQ ID NO: 319.

[1204] In one aspect, the present disclosure provides an antibody or antigen-binding fragment thereof comprising at least one, two, three, four, five, or six CDRs selected from: a. CDR-H1 comprising the amino acid sequence of SEQ ID NO: 590, b. CDR-H2 comprising the amino acid sequence of SEQ ID NO: 1132, c. CDR-H3 comprising the amino acid sequence of SEQ ID NO: 1674, d. CDR-L1 comprising the amino acid sequence of SEQ ID NO: 861, e. CDR-L2 comprising the amino acid sequence of SEQ ID NO: 1403, and f. CDR-L3 comprising the amino acid sequence of SEQ ID NO: 1945.

[1205] In one aspect, the present disclosure provides an antibody or antigen-binding fragment thereof comprising: a. CDR-H1 comprising the amino acid sequence of SEQ ID NO: 590, b. CDR-H2 comprising the amino acid sequence of SEQ ID NO: 1132, c. CDR-H3 comprising the amino acid sequence of SEQ ID NO: 1674, d. CDR-L1 comprising the amino acid sequence of SEQ ID NO: 861, e. CDR-L2 comprising the amino acid sequence of SEQ ID NO: 1403, and f. CDR-L3 comprising the amino acid sequence of SEQ ID NO: 1945. In one aspect, the present disclosure provides an antibody or antigen-binding fragment thereof comprising a CDR-H3 comprising the amino acid sequence of SEQ ID NO: 1674, and a CDR-L3 comprising the amino acid sequence of SEQ ID NO: 1945.

[1206] In one aspect, the present disclosure provides an antibody or antigen-binding fragment thereof comprising at least one, at least two, or all three VH CDR sequences selected from: a. CDR-H1 comprising the amino acid sequence of SEQ ID NO: 590, b. CDR-H2 comprising the amino acid sequence of SEQ ID NO: 1132, c. CDR-H3 comprising the amino acid sequence of SEQ ID NO: 1674, and a VL comprising the amino acid sequence of SEQ ID NO: 319.

[1207] In one aspect, the present disclosure provides an antibody or antigen-binding fragment thereof comprising at least one, at least two, or all three VL CDR sequences selected from: a. CDR-L1 comprising the amino acid sequence of SEQ ID NO: 861, b. CDR-L2 comprising the amino acid sequence of SEQ ID NO: 1403, c. CDR-L3 comprising the amino acid sequence of SEQ ID NO: 1945, and a VH comprising the amino acid sequence of SEQ ID NO: 48.

[1208] In one aspect, an antibody or antigen-binding fragment thereof is provided, wherein the antibody or antigen-binding fragment thereof comprises a heavy chain variable domain (VH) having at least 90%, 91%, 92%, 93%, 94%, 95%, 96%, 97%, 98%, 99%, or 100% sequence identity to the amino acid sequence SEQ ID NO: 48. In some embodiments, a VH sequence having at least 90%, 91%, 92%, 93%, 94%, 95%, 96%, 97%, 98%, or 99% identity contains substitutions (e.g., conservative substitutions), insertions, or deletions relative to the reference sequence, but an antibody or antigen-binding fragment thereof comprising that sequence retains the ability to bind to same antigen as of the parent (e.g., cancer associated antigen). In some embodiments, a total of 1 to 10 amino acids have been substituted, inserted and/or deleted in the amino acid sequence SEQ ID NO: 48. In some embodiments, substitutions, insertions, or deletions occur in regions outside the CDRs (e.g., in the FRs). Optionally, the antibody or antigen-binding fragment thereof comprises the VH sequence SEQ ID NO: 48, including one or more post-translational modifications of that sequence. In a particular embodiment, the VH comprises one, two or three CDRs selected from: a. CDR-H1, comprising the amino acid sequence SEQ ID NO: 590, b. CDR-H2, comprising the amino acid sequence SEQ ID NO: 1132, and c. CDR-H3, comprising the amino acid sequence SEQ ID NO: 1674.

[1209] In one aspect, an antibody or antigen-binding fragment thereof is provided, wherein the antibody or antigen-binding fragment thereof comprises a light chain variable domain (VL) having at least 90%, 91%, 92%, 93%, 94%, 95%, 96%, 97%, 98%, 99%, or 100% sequence identity to the amino acid sequence SEQ ID NO: 319. In some embodiments, a VL sequence having at least 90%, 91%, 92%, 93%, 94%, 95%, 96%, 97%, 98%, or 99% identity contains substitutions (e.g., conservative substitutions), insertions, or deletions relative to the reference sequence, but an antibody or antigen-binding fragment thereof comprising that sequence retains the ability to bind to same antigen as the parent (e.g., cancer associated antigen). In some embodiments, a total of 1 to 10 amino acids have been substituted, inserted and/or deleted in the amino acid sequence SEQ ID NO: 319. In some embodiments, the substitutions, insertions, or deletions occur in regions outside the CDRs (e.g., in the FRs). Optionally, the antibody or antigen-binding fragment thereof comprises the VL sequence SEQ ID NO: 319, including one or more post-translational modifications of that sequence. In a particular embodiment, the VL comprises one, two or three CDRs selected from: a. CDR-L1, comprising the amino acid sequence SEQ ID NO: 861, b. CDR-L2, comprising the amino acid sequence SEQ ID NO: 1403, and c. CDR-L3, comprising the amino acid sequence SEQ ID NO: 1945.

[1210] In one aspect, an antibody or antigen-binding fragment thereof is provided, wherein the antibody or antigen-binding fragment thereof comprises a VH as in any of the embodiments provided above, and a VL as in any of the embodiments provided above. In some embodiments, the antibody or antigen-binding fragment thereof comprises the VH amino acid sequence of SEQ ID NO: 48, and the VL amino acid sequence of SEQ ID NO: 319, optionally including post-translational modifications of those sequences.

### TBRE1036

[1211] In one aspect, the present disclosure provides an antibody or antigen-binding fragment thereof comprising at least one or both variable regions selected from: a. VH comprising the amino acid sequence of SEQ ID NO: 49 and b. VL comprising the amino acid sequence of SEQ ID NO: 320.

[1212] In one aspect, the present disclosure provides an antibody or antigen-binding fragment thereof comprising at least one, two, three, four, five, or six CDRs selected from: a. CDR-H1 comprising the amino acid sequence of SEQ ID NO: 591, b. CDR-H2 comprising the amino acid sequence of SEQ ID NO: 1133, c. CDR-H3 comprising the amino acid sequence of SEQ ID NO: 1675, d. CDR-L1 comprising the amino acid sequence of SEQ ID NO: 862, e. CDR-L2 comprising the amino acid sequence of SEQ ID NO: 1404, and f. CDR-L3 comprising the amino acid sequence of SEQ ID NO: 1946.

[1213] In one aspect, the present disclosure provides an antibody or antigen-binding fragment thereof comprising: a. CDR-H1 comprising the amino acid sequence of SEQ ID NO: 591, b. CDR-H2 comprising the amino acid sequence of SEQ ID NO: 1133, c. CDR-H3 comprising the amino acid sequence of SEQ ID NO: 1675, d. CDR-L1 comprising the amino acid sequence of SEQ ID NO: 862, e. CDR-L2 comprising the amino acid sequence of SEQ ID NO: 1404, and f. CDR-L3 comprising the amino acid sequence of SEQ ID NO: 1946. In one aspect, the present disclosure provides an antibody or antigen-binding fragment thereof comprising a CDR-H3 comprising the amino acid sequence of SEQ ID NO: 1675, and a CDR-L3 comprising the amino acid sequence of SEQ ID NO: 1946.

[1214] In one aspect, the present disclosure provides an antibody or antigen-binding fragment thereof comprising at least one, at least two, or all three VH CDR sequences selected from: a. CDR-H1 comprising the amino acid sequence of SEQ ID NO: 591, b. CDR-H2 comprising the amino acid sequence of SEQ ID NO: 1133, c. CDR-H3 comprising the amino acid sequence of SEQ ID NO: 1675, and a VL comprising the amino acid sequence of SEQ ID NO: 320.

[1215] In one aspect, the present disclosure provides an antibody or antigen-binding fragment thereof comprising at least one, at least two, or all three VL CDR sequences selected from: a. CDR-L1 comprising the amino acid sequence of SEQ ID NO: 862, b. CDR-L2 comprising the amino acid sequence of SEQ ID NO: 1404, c. CDR-L3 comprising the amino acid sequence of SEQ ID NO: 1946, and a VH comprising the amino acid sequence of SEQ ID NO: 49.

[1216] In one aspect, an antibody or antigen-binding fragment thereof is provided, wherein the antibody or antigen-binding fragment thereof comprises a heavy chain variable domain (VH) having at least 90%, 91%, 92%, 93%, 94%, 95%, 96%, 97%, 98%, 99%, or 100% sequence identity to the amino acid sequence SEQ ID NO: 49. In some embodiments, a VH sequence having at least 90%, 91%, 92%, 93%, 94%, 95%, 96%, 97%, 98%, or 99% identity contains substitutions (e.g., conservative substitutions), insertions, or deletions relative to the reference sequence, but an antibody or antigen-binding fragment thereof comprising that sequence retains the ability to bind to same antigen as of the parent (e.g., cancer associated antigen). In some embodiments, a total of 1 to 10 amino acids have been substituted, inserted and/or deleted in the amino acid sequence SEQ ID NO: 49. In some embodiments, substitutions, insertions, or deletions occur in regions outside the CDRs (e.g., in the FRs). Optionally, the antibody or antigen-binding fragment thereof comprises the VH sequence SEQ ID NO: 49, including one or more post-translational modifications of that sequence. In a particular embodiment, the VH comprises one, two or three CDRs selected from: a. CDR-H1, comprising the amino acid sequence SEQ ID NO: 591, b. CDR-H2, comprising the amino acid sequence SEQ ID NO: 1133, and c. CDR-H3, comprising the amino acid sequence SEQ ID NO: 1675.

[1217] In one aspect, an antibody or antigen-binding fragment thereof is provided, wherein the antibody or antigen-binding fragment thereof comprises a light chain variable domain (VL) having at least 90%, 91%, 92%, 93%, 94%, 95%, 96%, 97%, 98%, 99%, or 100% sequence identity to the amino acid sequence SEQ ID NO: 320. In some embodiments, a VL sequence having at least 90%, 91%, 92%, 93%, 94%, 95%, 96%, 97%, 98%, or 99% identity contains substitutions (e.g., conservative substitutions), insertions, or deletions relative to the reference sequence, but an antibody or antigen-binding fragment thereof comprising that sequence retains the ability to bind to same antigen as the parent (e.g., cancer associated antigen). In some embodiments, a total of 1 to 10 amino acids have been substituted, inserted and/or deleted in the amino acid sequence SEQ ID NO: 320. In some embodiments, the substitutions, insertions, or deletions occur in regions outside the CDRs (e.g., in the FRs). Optionally, the antibody or antigen-binding fragment thereof comprises the VL sequence SEQ ID NO: 320, including one or more post-translational modifications of that sequence. In a particular embodiment, the VL comprises one, two or three CDRs selected from: a. CDR-L1, comprising the amino acid sequence SEQ ID NO: 862, b. CDR-L2, comprising the amino acid sequence SEQ ID NO: 1404, and c. CDR-L3, comprising the amino acid sequence SEQ ID NO: 1946.

[1218] In one aspect, an antibody or antigen-binding fragment thereof is provided, wherein the antibody or antigen-binding fragment thereof comprises a VH as in any of the embodiments provided above, and a VL as in any of the embodiments provided above. In some embodiments, the antibody or antigen-binding fragment thereof comprises the VH amino acid sequence of SEQ ID NO: 49, and the VL amino acid sequence of SEQ ID NO: 320, optionally including post-translational modifications of those sequences.

### TBRE1037

[1219] In one aspect, the present disclosure provides an antibody or antigen-binding fragment thereof comprising at least one or both variable regions selected from: a. VH comprising the amino acid sequence of SEQ ID NO: 50 and b. VL comprising the amino acid sequence of SEQ ID NO: 321.

[1220] In one aspect, the present disclosure provides an antibody or antigen-binding fragment thereof comprising at least one, two, three, four, five, or six CDRs selected from: a. CDR-H1 comprising the amino acid sequence of SEQ ID NO: 592, b. CDR-H2 comprising the amino acid sequence of SEQ ID NO: 1134, c. CDR-H3 comprising the amino acid sequence of SEQ ID NO: 1676, d. CDR-L1 comprising the amino acid sequence of SEQ ID NO: 863, e. CDR-L2 comprising the amino acid sequence of SEQ ID NO: 1405, and f. CDR-L3 comprising the amino acid sequence of SEQ ID NO: 1947.

[1221] In one aspect, the present disclosure provides an antibody or antigen-binding fragment thereof comprising: a. CDR-H1 comprising the amino acid sequence of SEQ ID NO: 592, b. CDR-H2 comprising the amino acid sequence of SEQ ID NO: 1134, c. CDR-H3 comprising the amino acid sequence of SEQ ID NO: 1676, d. CDR-L1 comprising the amino acid sequence of SEQ ID NO: 863, e. CDR-L2 comprising the amino acid sequence of SEQ ID NO: 1405, and f. CDR-L3 comprising the amino acid sequence of SEQ ID NO: 1947. In one aspect, the present disclosure provides an antibody or antigen-binding fragment thereof comprising a CDR-H3 comprising the amino acid sequence of SEQ ID NO: 1676, and a CDR-L3 comprising the amino acid sequence of SEQ ID NO: 1947.

[1222] In one aspect, the present disclosure provides an antibody or antigen-binding fragment thereof comprising at least one, at least two, or all three VH CDR sequences selected from: a. CDR-H1 comprising the amino acid sequence of SEQ ID NO: 592, b. CDR-H2 comprising the amino acid sequence of SEQ ID NO: 1134, c. CDR-H3 comprising the amino acid sequence of SEQ ID NO: 1676, and a VL comprising the amino acid sequence of SEQ ID NO: 321.

[1223] In one aspect, the present disclosure provides an antibody or antigen-binding fragment thereof comprising at least one, at least two, or all three VL CDR sequences selected from: a. CDR-L1 comprising the amino acid sequence of SEQ ID NO: 863, b. CDR-L2 comprising the amino acid sequence of SEQ ID NO: 1405, c. CDR-L3 comprising the amino acid sequence of SEQ ID NO: 1947, and a VH comprising the amino acid sequence of SEQ ID NO: 50.

[1224] In one aspect, an antibody or antigen-binding fragment thereof is provided, wherein the antibody or antigen-binding fragment thereof comprises a heavy chain variable domain (VH) having at least 90%, 91%, 92%, 93%, 94%, 95%, 96%, 97%, 98%, 99%, or 100% sequence identity to the amino acid sequence SEQ ID NO: 50. In some embodiments, a VH sequence having at least 90%, 91%, 92%, 93%, 94%, 95%, 96%, 97%, 98%, or 99% identity contains substitutions (e.g., conservative substitutions), insertions, or deletions relative to the reference sequence, but an antibody or antigen-binding fragment thereof comprising that sequence retains the ability to bind to same antigen as of the parent (e.g., cancer associated antigen). In some embodiments, a total of 1 to 10 amino acids have been substituted, inserted and/or deleted in the amino acid sequence SEQ ID NO: 50. In some embodiments, substitutions, insertions, or deletions occur in regions outside the CDRs (e.g., in the FRs). Optionally, the antibody or antigen-binding fragment thereof comprises the VH sequence SEQ ID NO: 50, including one or more post-translational modifications of that sequence. In a particular embodiment, the VH comprises one, two or three CDRs selected from: a. CDR-H1, comprising the amino acid sequence SEQ ID NO: 592, b. CDR-H2, comprising the amino acid sequence SEQ ID NO: 1134, and c. CDR-H3, comprising the amino acid sequence SEQ ID NO: 1676.

[1225] In one aspect, an antibody or antigen-binding fragment thereof is provided, wherein the antibody or antigen-binding fragment thereof comprises a light chain variable domain (VL) having at least 90%, 91%, 92%, 93%, 94%, 95%, 96%, 97%, 98%, 99%, or 100% sequence identity to the amino acid sequence SEQ ID NO: 321. In some embodiments, a VL sequence having at least 90%, 91%, 92%, 93%, 94%, 95%, 96%, 97%, 98%, or 99% identity contains substitutions (e.g., conservative substitutions), insertions, or deletions relative to the reference sequence, but an antibody or antigen-binding fragment thereof comprising that sequence retains the ability to bind to same antigen as the parent (e.g., cancer associated antigen). In some embodiments, a total of 1 to 10 amino acids have been substituted, inserted and/or deleted in the amino acid sequence SEQ ID NO: 321. In some embodiments, the substitutions, insertions, or deletions occur in regions outside the CDRs (e.g., in the FRs). Optionally, the antibody or antigen-binding fragment thereof comprises the VL sequence SEQ ID NO: 321, including one or more post-translational modifications of that sequence. In a particular embodiment, the VL comprises one, two or three CDRs selected from: a. CDR-L1, comprising the amino acid sequence SEQ ID NO: 863, b. CDR-L2, comprising the amino acid sequence SEQ ID NO: 1405, and c. CDR-L3, comprising the amino acid sequence SEQ ID NO: 1947.

[1226] In one aspect, an antibody or antigen-binding fragment thereof is provided, wherein the antibody or antigen-binding fragment thereof comprises a VH as in any of the embodiments provided above, and a VL as in any of the embodiments provided above. In some embodiments, the antibody or antigen-binding fragment thereof comprises the VH amino acid sequence of SEQ ID NO: 50, and the VL amino acid sequence of SEQ ID NO: 321, optionally including post-translational modifications of those sequences.

### TBRE1038

[1227] In one aspect, the present disclosure provides an antibody or antigen-binding fragment thereof comprising at least one or both variable regions selected from: a. VH comprising the amino acid sequence of SEQ ID NO: 51 and b. VL comprising the amino acid sequence of SEQ ID NO: 322.

[1228] In one aspect, the present disclosure provides an antibody or antigen-binding fragment thereof comprising at least one, two, three, four, five, or six CDRs selected from: a. CDR-H1 comprising the amino acid sequence of SEQ ID NO: 593, b. CDR-H2 comprising the amino acid sequence of SEQ ID NO: 1135, c. CDR-H3 comprising the amino acid sequence of SEQ ID NO: 1677, d. CDR-L1 comprising the amino acid sequence of SEQ ID NO: 864, e. CDR-L2 comprising the amino acid sequence of SEQ ID NO: 1406, and f. CDR-L3 comprising the amino acid sequence of SEQ ID NO: 1948.

[1229] In one aspect, the present disclosure provides an antibody or antigen-binding fragment thereof comprising: a. CDR-H1 comprising the amino acid sequence of SEQ ID NO: 593, b. CDR-H2 comprising the amino acid sequence of SEQ ID NO: 1135, c. CDR-H3 comprising the amino acid sequence of SEQ ID NO: 1677, d. CDR-L1 comprising the amino acid sequence of SEQ ID NO: 864, e. CDR-L2 comprising the amino acid sequence of SEQ ID NO: 1406, and f. CDR-L3 comprising the amino acid sequence of SEQ ID NO: 1948. In one aspect, the present disclosure provides an antibody or antigen-binding fragment thereof comprising a CDR-H3 comprising the amino acid sequence of SEQ ID NO: 1677, and a CDR-L3 comprising the amino acid sequence of SEQ ID NO: 1948.

[1230] In one aspect, the present disclosure provides an antibody or antigen-binding fragment thereof comprising at least one, at least two, or all three VH CDR sequences selected from: a. CDR-H1 comprising the amino acid sequence of SEQ ID NO: 593, b. CDR-H2 comprising the amino acid sequence of SEQ ID NO: 1135, c. CDR-H3 comprising the amino acid sequence of SEQ ID NO: 1677, and a VL comprising the amino acid sequence of SEQ ID NO: 322.

[1231] In one aspect, the present disclosure provides an antibody or antigen-binding fragment thereof comprising at least one, at least two, or all three VL CDR sequences selected from: a. CDR-L1 comprising the amino acid sequence of SEQ ID NO: 864, b. CDR-L2 comprising the amino acid sequence of SEQ ID NO: 1406, c. CDR-L3 comprising the amino acid sequence of SEQ ID NO: 1948, and a VH comprising the amino acid sequence of SEQ ID NO: 51.

[1232] In one aspect, an antibody or antigen-binding fragment thereof is provided, wherein the antibody or antigen-binding fragment thereof comprises a heavy chain variable domain (VH) having at least 90%, 91%, 92%, 93%, 94%, 95%, 96%, 97%, 98%, 99%, or 100% sequence identity to the amino acid sequence SEQ ID NO: 51. In some embodiments, a VH sequence having at least 90%, 91%, 92%, 93%, 94%, 95%, 96%, 97%, 98%, or 99% identity contains substitutions (e.g., conservative substitutions), insertions, or deletions relative to the reference sequence, but an antibody or antigen-binding fragment thereof comprising that sequence retains the ability to bind to same antigen as of the parent (e.g., cancer associated antigen). In some embodiments, a total of 1 to 10 amino acids have been substituted, inserted and/or deleted in the amino acid sequence SEQ ID NO: 51. In some embodiments, substitutions, insertions, or deletions occur in regions outside the CDRs (e.g., in the FRs). Optionally, the antibody or antigen-binding fragment thereof comprises the VH sequence SEQ ID NO: 51, including one or more post-translational modifications of that sequence. In a particular embodiment, the VH comprises one, two or three CDRs selected from: a. CDR-H1, comprising the amino acid sequence SEQ ID NO: 593, b. CDR-H2, comprising the amino acid sequence SEQ ID NO: 1135, and c. CDR-H3, comprising the amino acid sequence SEQ ID NO: 1677.

[1233] In one aspect, an antibody or antigen-binding fragment thereof is provided, wherein the antibody or antigen-binding fragment thereof comprises a light chain variable domain (VL) having at least 90%, 91%, 92%, 93%, 94%, 95%, 96%, 97%, 98%, 99%, or 100% sequence identity to the amino acid sequence SEQ ID NO: 322. In some embodiments, a VL sequence having at least 90%, 91%, 92%, 93%, 94%, 95%, 96%, 97%, 98%, or 99% identity contains substitutions (e.g., conservative substitutions), insertions, or deletions relative to the reference sequence, but an antibody or antigen-binding fragment thereof comprising that sequence retains the ability to bind to same antigen as the parent (e.g., cancer associated antigen). In some embodiments, a total of 1 to 10 amino acids have been substituted, inserted and/or deleted in the amino acid sequence SEQ ID NO: 322. In some embodiments, the substitutions, insertions, or deletions occur in regions outside the CDRs (e.g., in the FRs). Optionally, the antibody or antigen-binding fragment thereof comprises the VL sequence SEQ ID NO: 322, including one or more post-translational modifications of that sequence. In a particular embodiment, the VL comprises one, two or three CDRs selected from: a. CDR-L1, comprising the amino acid sequence SEQ ID NO: 864, b. CDR-L2, comprising the amino acid sequence SEQ ID NO: 1406, and c. CDR-L3, comprising the amino acid sequence SEQ ID NO: 1948.

[1234] In one aspect, an antibody or antigen-binding fragment thereof is provided, wherein the antibody or antigen-binding fragment thereof comprises a VH as in any of the embodiments provided above, and a VL as in any of the embodiments provided above. In some embodiments, the antibody or antigen-binding fragment thereof comprises the VH amino acid sequence of SEQ ID NO: 51, and the VL amino acid sequence of SEQ ID NO: 322, optionally including post-translational modifications of those sequences.

### TBRE1039

[1235] In one aspect, the present disclosure provides an antibody or antigen-binding fragment thereof comprising at least one or both variable regions selected from: a. VH comprising the amino acid sequence of SEQ ID NO: 52 and b. VL comprising the amino acid sequence of SEQ ID NO: 323.

[1236] In one aspect, the present disclosure provides an antibody or antigen-binding fragment thereof comprising at least one, two, three, four, five, or six CDRs selected from: a. CDR-H1 comprising the amino acid sequence of SEQ ID NO: 594, b. CDR-H2 comprising the amino acid sequence of SEQ ID NO: 1136, c. CDR-H3 comprising the amino acid sequence of SEQ ID NO: 1678, d. CDR-L1 comprising the amino acid sequence of SEQ ID NO: 865, e. CDR-L2 comprising the amino acid sequence of SEQ ID NO: 1407, and f. CDR-L3 comprising the amino acid sequence of SEQ ID NO: 1949. In one aspect, the present disclosure provides an antibody or antigen-binding fragment thereof comprising: a. CDR-H1 comprising the amino acid sequence of SEQ ID NO: 594, b. CDR-H2 comprising the amino acid sequence of SEQ ID NO: 1136, c. CDR-H3 comprising the amino acid sequence of SEQ ID NO: 1678, d. CDR-L1 comprising the amino acid sequence of SEQ ID NO: 865, e. CDR-L2 comprising the amino acid sequence of SEQ ID NO: 1407, and f. CDR-L3 comprising the amino acid sequence of SEQ ID NO: 1949. In one aspect, the present disclosure provides an antibody or antigen-binding fragment thereof comprising a CDR-H3 comprising the amino acid sequence of SEQ ID NO: 1678 and a f. CDR-L3 comprising the amino acid sequence of SEQ ID NO: 1949.

[1237] In one aspect, the present disclosure provides an antibody or antigen-binding fragment thereof comprising at least one, at least two, or all three VH CDR sequences selected from: a. CDR-H1 comprising the amino acid sequence of SEQ ID NO: 594, b. CDR-H2 comprising the amino acid sequence of SEQ ID NO: 1136, c. CDR-H3 comprising the amino acid sequence of SEQ ID NO: 1678, and a VL comprising the amino acid sequence of SEQ ID NO: 323.

[1238] In one aspect, the present disclosure provides an antibody or antigen-binding fragment thereof comprising at least one, at least two, or all three VL CDR sequences selected from: a. CDR-L1 comprising the amino acid sequence of SEQ ID NO: 865, b. CDR-L2 comprising the amino acid sequence of SEQ ID NO: 1407, c. CDR-L3 comprising the amino acid sequence of SEQ ID NO: 1949, and a VH comprising the amino acid sequence of SEQ ID NO: 52.

[1239] In one aspect, an antibody or antigen-binding fragment thereof is provided, wherein the antibody or antigen-binding fragment thereof comprises a heavy chain variable domain (VH) having at least 90%, 91%, 92%, 93%, 94%, 95%, 96%, 97%, 98%, 99%, or 100% sequence identity to the amino acid sequence SEQ ID NO: 52. In some embodiments, a VH sequence having at least 90%, 91%, 92%, 93%, 94%, 95%, 96%, 97%, 98%, or 99% identity contains substitutions (e.g., conservative substitutions), insertions, or deletions relative to the reference sequence, but an antibody or antigen-binding fragment thereof comprising that sequence retains the ability to bind to same antigen as of the parent (e.g., cancer associated antigen). In some embodiments, a total of 1 to 10 amino acids have been substituted, inserted and/or deleted in the amino acid sequence SEQ ID NO: 52. In some embodiments, substitutions, insertions, or deletions occur in regions outside the CDRs (e.g., in the FRs). Optionally, the antibody or antigen-binding fragment thereof comprises the VH sequence SEQ ID NO: 52, including one or more post-translational modifications of that sequence. In a particular embodiment, the VH comprises one, two or three CDRs selected from: a. CDR-H1, comprising the amino acid sequence SEQ ID NO: 594, b. CDR-H2, comprising the amino acid sequence SEQ ID NO: 1136, and c. CDR-H3, comprising the amino acid sequence SEQ ID NO: 1678.

[1240] In one aspect, an antibody or antigen-binding fragment thereof is provided, wherein the antibody or antigen-binding fragment thereof comprises a light chain variable domain (VL) having at least 90%, 91%, 92%, 93%, 94%, 95%, 96%, 97%, 98%, 99%, or 100% sequence identity to the amino acid sequence SEQ ID NO: 323. In some embodiments, a VL sequence having at least 90%, 91%, 92%, 93%, 94%, 95%, 96%, 97%, 98%, or 99% identity contains substitutions (e.g., conservative substitutions), insertions, or deletions relative to the reference sequence, but an antibody or antigen-binding fragment thereof comprising that sequence retains the ability to bind to same antigen as the parent (e.g., cancer associated antigen). In some embodiments, a total of 1 to 10 amino acids have been substituted, inserted and/or deleted in the amino acid sequence SEQ ID NO: 323. In some embodiments, the substitutions, insertions, or deletions occur in regions outside the CDRs (e.g., in the FRs). Optionally, the antibody or antigen-binding fragment thereof comprises the VL sequence SEQ ID NO: 323, including one or more post-translational modifications of that sequence. In a particular embodiment, the VL comprises one, two or three CDRs selected from: a. CDR-L1, comprising the amino acid sequence SEQ ID NO: 865, b. CDR-L2, comprising the amino acid sequence SEQ ID NO: 1407, and c. CDR-L3, comprising the amino acid sequence SEQ ID NO: 1949.

[1241] In one aspect, an antibody or antigen-binding fragment thereof is provided, wherein the antibody or antigen-binding fragment thereof comprises a VH as in any of the embodiments provided above, and a VL as in any of the embodiments provided above. In some embodiments, the antibody or antigen-binding fragment thereof comprises the VH amino acid sequence of SEQ ID NO: 52, and the VL amino acid sequence of SEQ ID NO: 323, optionally including post-translational modifications of those sequences.

### TBRE1040

[1242] In one aspect, the present disclosure provides an antibody or antigen-binding fragment thereof comprising at least one or both variable regions selected from: a. VH comprising the amino acid sequence of SEQ ID NO: 53 and b. VL comprising the amino acid sequence of SEQ ID NO: 324.

[1243] In one aspect, the present disclosure provides an antibody or antigen-binding fragment thereof comprising at least one, two, three, four, five, or six CDRs selected from: a. CDR-H1 comprising the amino acid sequence of SEQ ID NO: 595, b. CDR-H2 comprising the amino acid sequence of SEQ ID NO: 1137, c. CDR-H3 comprising the amino acid sequence of SEQ ID NO: 1679, d. CDR-L1 comprising the amino acid sequence of SEQ ID NO: 866, e. CDR-L2 comprising the amino acid sequence of SEQ ID NO: 1408, and f. CDR-L3 comprising the amino acid sequence of SEQ ID NO: 1950.

[1244] In one aspect, the present disclosure provides an antibody or antigen-binding fragment thereof comprising: a. CDR-H1 comprising the amino acid sequence of SEQ ID NO: 595, b. CDR-H2 comprising the amino acid sequence of SEQ ID NO: 1137, c. CDR-H3 comprising the amino acid sequence of SEQ ID NO: 1679, d. CDR-L1 comprising the amino acid sequence of SEQ ID NO: 866, e. CDR-L2 comprising the amino acid sequence of SEQ ID NO: 1408, and f. CDR-L3 comprising the amino acid sequence of SEQ ID NO: 1950. In one aspect, the present disclosure provides an antibody or antigen-binding fragment thereof comprising a CDR-H3 comprising the amino acid sequence of SEQ ID NO: 1679, and a CDR-L3 comprising the amino acid sequence of SEQ ID NO: 1950.

[1245] In one aspect, the present disclosure provides an antibody or antigen-binding fragment thereof comprising at least one, at least two, or all three VH CDR sequences selected from: a. CDR-H1 comprising the amino acid sequence of SEQ ID NO: 595, b. CDR-H2 comprising the amino acid sequence of SEQ ID NO: 1137, c. CDR-H3 comprising the amino acid sequence of SEQ ID NO: 1679, and a VL comprising the amino acid sequence of SEQ ID NO: 324.

[1246] In one aspect, the present disclosure provides an antibody or antigen-binding fragment thereof comprising at least one, at least two, or all three VL CDR sequences selected from: a. CDR-L1 comprising the amino acid sequence of SEQ ID NO: 866, b. CDR-L2 comprising the amino acid sequence of SEQ ID NO: 1408, c. CDR-L3 comprising the amino acid sequence of SEQ ID NO: 1950, and a VH comprising the amino acid sequence of SEQ ID NO: 53.

[1247] In one aspect, an antibody or antigen-binding fragment thereof is provided, wherein the antibody or antigen-binding fragment thereof comprises a heavy chain variable domain (VH) having at least 90%, 91%, 92%, 93%, 94%, 95%, 96%, 97%, 98%, 99%, or 100% sequence identity to the amino acid sequence SEQ ID NO: 53. In some embodiments, a VH sequence having at least 90%, 91%, 92%, 93%, 94%, 95%, 96%, 97%, 98%, or 99% identity contains substitutions (e.g., conservative substitutions), insertions, or deletions relative to the reference sequence, but an antibody or antigen-binding fragment thereof comprising that sequence retains the ability to bind to same antigen as of the parent (e.g., cancer associated antigen). In some embodiments, a total of 1 to 10 amino acids have been substituted, inserted and/or deleted in the amino acid sequence SEQ ID NO: 53. In some embodiments, substitutions, insertions, or deletions occur in regions outside the CDRs (e.g., in the FRs). Optionally, the antibody or antigen-binding fragment thereof comprises the VH sequence SEQ ID NO: 53, including one or more post-translational modifications of that sequence. In a particular embodiment, the VH comprises one, two or three CDRs selected from: a. CDR-H1, comprising the amino acid sequence SEQ ID NO: 595, b. CDR-H2, comprising the amino acid sequence SEQ ID NO: 1137, and a CDR-H3, comprising the amino acid sequence SEQ ID NO: 1679.

[1248] In one aspect, an antibody or antigen-binding fragment thereof is provided, wherein the antibody or antigen-binding fragment thereof comprises a light chain variable domain (VL) having at least 90%, 91%, 92%, 93%, 94%, 95%, 96%, 97%, 98%, 99%, or 100% sequence identity to the amino acid sequence SEQ ID NO: 324. In some embodiments, a VL sequence having at least 90%, 91%, 92%, 93%, 94%, 95%, 96%, 97%, 98%, or 99% identity contains substitutions (e.g., conservative substitutions), insertions, or deletions relative to the reference sequence, but an antibody or antigen-binding fragment thereof comprising that sequence retains the ability to bind to same antigen as the parent (e.g., cancer associated antigen). In some embodiments, a total of 1 to 10 amino acids have been substituted, inserted and/or deleted in the amino acid sequence SEQ ID NO: 324. In some embodiments, the substitutions, insertions, or deletions occur in regions outside the CDRs (e.g., in the FRs). Optionally, the antibody or antigen-binding fragment thereof comprises the VL sequence SEQ ID NO: 324, including one or more post-translational modifications of that sequence. In a particular embodiment, the VL comprises one, two or three CDRs selected from: a. CDR-L1, comprising the amino acid sequence SEQ ID NO: 866, b. CDR-L2, comprising the amino acid sequence SEQ ID NO: 1408, and c. CDR-L3, comprising the amino acid sequence SEQ ID NO: 1950.

[1249] In one aspect, an antibody or antigen-binding fragment thereof is provided, wherein the antibody or antigen-binding fragment thereof comprises a VH as in any of the embodiments provided above, and a VL as in any of the embodiments provided above. In some embodiments, the antibody or antigen-binding fragment thereof comprises the VH amino acid sequence of SEQ ID NO: 53, and the VL amino acid sequence of SEQ ID NO: 324, optionally including post-translational modifications of those sequences.

### TBRE1041

[1250] In one aspect, the present disclosure provides an antibody or antigen-binding fragment thereof comprising at least one or both variable regions selected from: a. VH comprising the amino acid sequence of SEQ ID NO: 54 and b. VL comprising the amino acid sequence of SEQ ID NO: 325.

[1251] In one aspect, the present disclosure provides an antibody or antigen-binding fragment thereof comprising at least one, two, three, four, five, or six CDRs selected from: a. CDR-H1 comprising the amino acid sequence of SEQ ID NO: 596, b. CDR-H2 comprising the amino acid sequence of SEQ ID NO: 1138, c. CDR-H3 comprising the amino acid sequence of SEQ ID NO: 1680, d. CDR-L1 comprising the amino acid sequence of SEQ ID NO: 867, e. CDR-L2 comprising the amino acid sequence of SEQ ID NO: 1409, and f. CDR-L3 comprising the amino acid sequence of SEQ ID NO: 1951.

[1252] In one aspect, the present disclosure provides an antibody or antigen-binding fragment thereof comprising: a. CDR-H1 comprising the amino acid sequence of SEQ ID NO: 596, b. CDR-H2 comprising the amino acid sequence of SEQ ID NO: 1138, c. CDR-H3 comprising the amino acid sequence of SEQ ID NO: 1680, d. CDR-L1 comprising the amino acid sequence of SEQ ID NO: 867, e. CDR-L2 comprising the amino acid sequence of SEQ ID NO: 1409, and f. CDR-L3 comprising the amino acid sequence of SEQ ID NO: 1951. In one aspect, the present disclosure provides an antibody or antigen-binding fragment thereof comprising a CDR-H3 comprising the amino acid sequence of SEQ ID NO: 1680, and a CDR-L3 comprising the amino acid sequence of SEQ ID NO: 1951.

[1253] In one aspect, the present disclosure provides an antibody or antigen-binding fragment thereof comprising at least one, at least two, or all three VH CDR sequences selected from: a. CDR-H1 comprising the amino acid sequence of SEQ ID NO: 596, b. CDR-H2 comprising the amino acid sequence of SEQ ID NO: 1138, c. CDR-H3 comprising the amino acid sequence of SEQ ID NO: 1680, and a VL comprising the amino acid sequence of SEQ ID NO: 325.

[1254] In one aspect, the present disclosure provides an antibody or antigen-binding fragment thereof comprising at least one, at least two, or all three VL CDR sequences selected from: a. CDR-L1 comprising the amino acid sequence of SEQ ID NO: 867, b. CDR-L2 comprising the amino acid sequence of SEQ ID NO: 1409, c. CDR-L3 comprising the amino acid sequence of SEQ ID NO: 1951, and a VH comprising the amino acid sequence of SEQ ID NO: 54.

[1255] In one aspect, an antibody or antigen-binding fragment thereof is provided, wherein the antibody or antigen-binding fragment thereof comprises a heavy chain variable domain (VH) having at least 90%, 91%, 92%, 93%, 94%, 95%, 96%, 97%, 98%, 99%, or 100% sequence identity to the amino acid sequence SEQ ID NO: 54. In some embodiments, a VH sequence having at least 90%, 91%, 92%, 93%, 94%, 95%, 96%, 97%, 98%, or 99% identity contains substitutions (e.g., conservative substitutions), insertions, or deletions relative to the reference sequence, but an antibody or antigen-binding fragment thereof comprising that sequence retains the ability to bind to same antigen as of the parent (e.g., cancer associated antigen). In some embodiments, a total of 1 to 10 amino acids have been substituted, inserted and/or deleted in the amino acid sequence SEQ ID NO: 54. In some embodiments, substitutions, insertions, or deletions occur in regions outside the CDRs (e.g., in the FRs). Optionally, the antibody or antigen-binding fragment thereof comprises the VH sequence SEQ ID NO: 54, including one or more post-translational modifications of that sequence. In a particular embodiment, the VH comprises one, two or three CDRs selected from: a CDR-H1, comprising the amino acid sequence SEQ ID NO: 596, b. CDR-H2, comprising the amino acid sequence SEQ ID NO: 1138, and c. CDR-H3, comprising the amino acid sequence SEQ ID NO: 1680.

[1256] In one aspect, an antibody or antigen-binding fragment thereof is provided, wherein the antibody or antigen-binding fragment thereof comprises a light chain variable domain (VL) having at least 90%, 91%, 92%, 93%, 94%, 95%, 96%, 97%, 98%, 99%, or 100% sequence identity to the amino acid sequence SEQ ID NO: 325. In some embodiments, a VL sequence having at least 90%, 91%, 92%, 93%, 94%, 95%, 96%, 97%, 98%, or 99% identity contains substitutions (e.g., conservative substitutions), insertions, or deletions relative to the reference sequence, but an antibody or antigen-binding fragment thereof comprising that sequence retains the ability to bind to same antigen as the parent (e.g., cancer associated antigen). In some embodiments, a total of 1 to 10 amino acids have been substituted, inserted and/or deleted in the amino acid sequence SEQ ID NO: 325. In some embodiments, the substitutions, insertions, or deletions occur in regions outside the CDRs (e.g., in the FRs). Optionally, the antibody or antigen-binding fragment thereof comprises the VL sequence SEQ ID NO: 325, including one or more post-translational modifications of that sequence. In a particular embodiment, the VL comprises one, two or three CDRs selected from: a. CDR-L1, comprising the amino acid sequence SEQ ID NO: 867, b. CDR-L2, comprising the amino acid sequence SEQ ID NO: 1409, and c. CDR-L3, comprising the amino acid sequence SEQ ID NO: 1951.

[1257] In one aspect, an antibody or antigen-binding fragment thereof is provided, wherein the antibody or antigen-binding fragment thereof comprises a VH as in any of the embodiments provided above, and a VL as in any of the embodiments provided above. In some embodiments, the antibody or antigen-binding fragment thereof comprises the VH amino acid sequence of SEQ ID NO: 54, and the VL amino acid sequence of SEQ ID NO: 325, optionally including post-translational modifications of those sequences.

### TBRE1042

[1258] In one aspect, the present disclosure provides an antibody or antigen-binding fragment thereof comprising at least one or both variable regions selected from: a. VH comprising the amino acid sequence of SEQ ID NO: 55 and b. VL comprising the amino acid sequence of SEQ ID NO: 326.

[1259] In one aspect, the present disclosure provides an antibody or antigen-binding fragment thereof comprising at least one, two, three, four, five, or six CDRs selected from: a. CDR-H1 comprising the amino acid sequence of SEQ ID NO: 597, b. CDR-H2 comprising the amino acid sequence of SEQ ID NO: 1139, c. CDR-H3 comprising the amino acid sequence of SEQ ID NO: 1681, d. CDR-L1 comprising the amino acid sequence of SEQ ID NO: 868, e. CDR-L2 comprising the amino acid sequence of SEQ ID NO: 1410, and f. CDR-L3 comprising the amino acid sequence of SEQ ID NO: 1952.

[1260] In one aspect, the present disclosure provides an antibody or antigen-binding fragment thereof comprising: a. CDR-H1 comprising the amino acid sequence of SEQ ID NO: 597, b. CDR-H2 comprising the amino acid sequence of SEQ ID NO: 1139, c. CDR-H3 comprising the amino acid sequence of SEQ ID NO: 1681, d. CDR-L1 comprising the amino acid sequence of SEQ ID NO: 868, e. CDR-L2 comprising the amino acid sequence of SEQ ID NO: 1410, and f. CDR-L3 comprising the amino acid sequence of SEQ ID NO: 1952. In one aspect, the present disclosure provides an antibody or antigen-binding fragment thereof comprising a CDR-H3 comprising the amino acid sequence of SEQ ID NO: 1681, and a CDR-L3 comprising the amino acid sequence of SEQ ID NO: 1952.

[1261] In one aspect, the present disclosure provides an antibody or antigen-binding fragment thereof comprising at least one, at least two, or all three VH CDR sequences selected from: a. CDR-H1 comprising the amino acid sequence of SEQ ID NO: 597, b. CDR-H2 comprising the amino acid sequence of SEQ ID NO: 1139, c. CDR-H3 comprising the amino acid sequence of SEQ ID NO: 1681, and a VL comprising the amino acid sequence of SEQ ID NO: 326.

[1262] In one aspect, the present disclosure provides an antibody or antigen-binding fragment thereof comprising at least one, at least two, or all three VL CDR sequences selected from: a. CDR-L1 comprising the amino acid sequence of SEQ ID NO: 868, b. CDR-L2 comprising the amino acid sequence of SEQ ID NO: 1410, c. CDR-L3 comprising the amino acid sequence of SEQ ID NO: 1952, and a VH comprising the amino acid sequence of SEQ ID NO: 55.

[1263] In one aspect, an antibody or antigen-binding fragment thereof is provided, wherein the antibody or antigen-binding fragment thereof comprises a heavy chain variable domain (VH) having at least 90%, 91%, 92%, 93%, 94%, 95%, 96%, 97%, 98%, 99%, or 100% sequence identity to the amino acid sequence SEQ ID NO: 55. In some embodiments, a VH sequence having at least 90%, 91%, 92%, 93%, 94%, 95%, 96%, 97%, 98%, or 99% identity contains substitutions (e.g., conservative substitutions), insertions, or deletions relative to the reference sequence, but an antibody or antigen-binding fragment thereof comprising that sequence retains the ability to bind to same antigen as of the parent (e.g., cancer associated antigen). In some embodiments, a total of 1 to 10 amino acids have been substituted, inserted and/or deleted in the amino acid sequence SEQ ID NO: 55. In some embodiments, substitutions, insertions, or deletions occur in regions outside the CDRs (e.g., in the FRs). Optionally, the antibody or antigen-binding fragment thereof comprises the VH sequence SEQ ID NO: 55, including one or more post-translational modifications of that sequence. In a particular embodiment, the VH comprises one, two or three CDRs selected from: a. CDR-H1, comprising the amino acid sequence SEQ ID NO: 597, b. CDR-H2, comprising the amino acid sequence SEQ ID NO: 1139, and c. CDR-H3, comprising the amino acid sequence SEQ ID NO: 1681.

[1264] In one aspect, an antibody or antigen-binding fragment thereof is provided, wherein the antibody or antigen-binding fragment thereof comprises a light chain variable domain (VL) having at least 90%, 91%, 92%, 93%, 94%, 95%, 96%, 97%, 98%, 99%, or 100% sequence identity to the amino acid sequence SEQ ID NO: 326. In some embodiments, a VL sequence having at least 90%, 91%, 92%, 93%, 94%, 95%, 96%, 97%, 98%, or 99% identity contains substitutions (e.g., conservative substitutions), insertions, or deletions relative to the reference sequence, but an antibody or antigen-binding fragment thereof comprising that sequence retains the ability to bind to same antigen as the parent (e.g., cancer associated antigen). In some embodiments, a total of 1 to 10 amino acids have been substituted, inserted and/or deleted in the amino acid sequence SEQ ID NO: 326. In some embodiments, the substitutions, insertions, or deletions occur in regions outside the CDRs (e.g., in the FRs). Optionally, the antibody or antigen-binding fragment thereof comprises the VL sequence SEQ ID NO: 326, including one or more post-translational modifications of that sequence. In a particular embodiment, the VL comprises one, two or three CDRs selected from: a. CDR-L1, comprising the amino acid sequence SEQ ID NO: 868, b. CDR-L2, comprising the amino acid sequence SEQ ID NO: 1410, and c. CDR-L3, comprising the amino acid sequence SEQ ID NO: 1952.

[1265] In one aspect, an antibody or antigen-binding fragment thereof is provided, wherein the antibody or antigen-binding fragment thereof comprises a VH as in any of the embodiments provided above, and a VL as in any of the embodiments provided above. In some embodiments, the antibody or antigen-binding fragment thereof comprises the VH amino acid sequence of SEQ ID NO: 55, and the VL amino acid sequence of SEQ ID NO: 326, optionally including post-translational modifications of those sequences.

### TBRE1043

[1266] In one aspect, the present disclosure provides an antibody or antigen-binding fragment thereof comprising at least one or both variable regions selected from: a. VH comprising the amino acid sequence of SEQ ID NO: 56 and b. VL comprising the amino acid sequence of SEQ ID NO: 327.

[1267] In one aspect, the present disclosure provides an antibody or antigen-binding fragment thereof comprising at least one, two, three, four, five, or six CDRs selected from: a. CDR-H1 comprising the amino acid sequence of SEQ ID NO: 598, b. CDR-H2 comprising the amino acid sequence of SEQ ID NO: 1140, c. CDR-H3 comprising the amino acid sequence of SEQ ID NO: 1682, d. CDR-L1 comprising the amino acid sequence of SEQ ID NO: 869, e. CDR-L2 comprising the amino acid sequence of SEQ ID NO: 1411, and f. CDR-L3 comprising the amino acid sequence of SEQ ID NO: 1953.

[1268] In one aspect, the present disclosure provides an antibody or antigen-binding fragment thereof comprising: a. CDR-H1 comprising the amino acid sequence of SEQ ID NO: 598, b. CDR-H2 comprising the amino acid sequence of SEQ ID NO: 1140, c. CDR-H3 comprising the amino acid sequence of SEQ ID NO: 1682, d. CDR-L1 comprising the amino acid sequence of SEQ ID NO: 869, e. CDR-L2 comprising the amino acid sequence of SEQ ID NO: 1411, and f. CDR-L3 comprising the amino acid sequence of SEQ ID NO: 1953. In one aspect, the present disclosure provides an antibody or antigen-binding fragment thereof comprising a CDR-H3 comprising the amino acid sequence of SEQ ID NO: 1682 and a CDR-L3 comprising the amino acid sequence of SEQ ID NO: 1953.

[1269] In one aspect, the present disclosure provides an antibody or antigen-binding fragment thereof comprising at least one, at least two, or all three VH CDR sequences selected from: a. CDR-H1 comprising the amino acid sequence of SEQ ID NO: 598, b. CDR-H2 comprising the amino acid sequence of SEQ ID NO: 1140, c. CDR-H3 comprising the amino acid sequence of SEQ ID NO: 1682, and a VL comprising the amino acid sequence of SEQ ID NO: 327.

[1270] In one aspect, the present disclosure provides an antibody or antigen-binding fragment thereof comprising at least one, at least two, or all three VL CDR sequences selected from: a. CDR-L1 comprising the amino acid sequence of SEQ ID NO: 869, b. CDR-L2 comprising the amino acid sequence of SEQ ID NO: 1411, c. CDR-L3 comprising the amino acid sequence of SEQ ID NO: 1953, and a VH comprising the amino acid sequence of SEQ ID NO: 56.

[1271] In one aspect, an antibody or antigen-binding fragment thereof is provided, wherein the antibody or antigen-binding fragment thereof comprises a heavy chain variable domain (VH) having at least 90%, 91%, 92%, 93%, 94%, 95%, 96%, 97%, 98%, 99%, or 100% sequence identity to the amino acid sequence SEQ ID NO: 56. In some embodiments, a VH sequence having at least 90%, 91%, 92%, 93%, 94%, 95%, 96%, 97%, 98%, or 99% identity contains substitutions (e.g., conservative substitutions), insertions, or deletions relative to the reference sequence, but an antibody or antigen-binding fragment thereof comprising that sequence retains the ability to bind to same antigen as of the parent (e.g., cancer associated antigen). In some embodiments, a total of 1 to 10 amino acids have been substituted, inserted and/or deleted in the amino acid sequence SEQ ID NO: 56. In some embodiments, substitutions, insertions, or deletions occur in regions outside the CDRs (e.g., in the FRs). Optionally, the antibody or antigen-binding fragment thereof comprises the VH sequence SEQ ID NO: 56, including one or more post-translational modifications of that sequence. In a particular embodiment, the VH comprises one, two or three CDRs selected from: a. CDR-H1, comprising the amino acid sequence SEQ ID NO: 598, b. CDR-H2, comprising the amino acid sequence SEQ ID NO: 1140, and c. CDR-H3, comprising the amino acid sequence SEQ ID NO: 1682.

[1272] In one aspect, an antibody or antigen-binding fragment thereof is provided, wherein the antibody or antigen-binding fragment thereof comprises a light chain variable domain (VL) having at least 90%, 91%, 92%, 93%, 94%, 95%, 96%, 97%, 98%, 99%, or 100% sequence identity to the amino acid sequence SEQ ID NO: 327. In some embodiments, a VL sequence having at least 90%, 91%, 92%, 93%, 94%, 95%, 96%, 97%, 98%, or 99% identity contains substitutions (e.g., conservative substitutions), insertions, or deletions relative to the reference sequence, but an antibody or antigen-binding fragment thereof comprising that sequence retains the ability to bind to same antigen as the parent (e.g., cancer associated antigen). In some embodiments, a total of 1 to 10 amino acids have been substituted, inserted and/or deleted in the amino acid sequence SEQ ID NO: 327. In some embodiments, the substitutions, insertions, or deletions occur in regions outside the CDRs (e.g., in the FRs). Optionally, the antibody or antigen-binding fragment thereof comprises the VL sequence SEQ ID NO: 327, including one or more post-translational modifications of that sequence. In a particular embodiment, the VL comprises one, two or three CDRs selected from: a. CDR-L1, comprising the amino acid sequence SEQ ID NO: 869, b. CDR-L2, comprising the amino acid sequence SEQ ID NO: 1411, and c. CDR-L3, comprising the amino acid sequence SEQ ID NO: 1953.

[1273] In one aspect, an antibody or antigen-binding fragment thereof is provided, wherein the antibody or antigen-binding fragment thereof comprises a VH as in any of the embodiments provided above, and a VL as in any of the embodiments provided above. In some embodiments, the antibody or antigen-binding fragment thereof comprises the VH amino acid sequence of SEQ ID NO: 56, and the VL amino acid sequence of SEQ ID NO: 327, optionally including post-translational modifications of those sequences.

### TBRE1044

[1274] In one aspect, the present disclosure provides an antibody or antigen-binding fragment thereof comprising at least one or both variable regions selected from: a. VH comprising the amino acid sequence of SEQ ID NO: 57 and b. VL comprising the amino acid sequence of SEQ ID NO: 328.

[1275] In one aspect, the present disclosure provides an antibody or antigen-binding fragment thereof comprising at least one, two, three, four, five, or six CDRs selected from: a. CDR-H1 comprising the amino acid sequence of SEQ ID NO: 599, b. CDR-H2 comprising the amino acid sequence of SEQ ID NO: 1141, c. CDR-H3 comprising the amino acid sequence of SEQ ID NO: 1683, c. CDR-L1 comprising the amino acid sequence of SEQ ID NO: 870, e. CDR-L2 comprising the amino acid sequence of SEQ ID NO: 1412, and f. CDR-L3 comprising the amino acid sequence of SEQ ID NO: 1954. In one aspect, the present disclosure provides an antibody or antigen-binding fragment thereof comprising: a. CDR-H1 comprising the amino acid sequence of SEQ ID NO: 599, b. CDR-H2 comprising the amino acid sequence of SEQ ID NO: 1141, c. CDR-H3 comprising the amino acid sequence of SEQ ID NO: 1683, c. CDR-L1 comprising the amino acid sequence of SEQ ID NO: 870, e. CDR-L2 comprising the amino acid sequence of SEQ ID NO: 1412, and f. CDR-L3 comprising the amino acid sequence of SEQ ID NO: 1954. In one aspect, the present disclosure provides an antibody or antigen-binding fragment thereof comprising a CDR-H3 comprising the amino acid sequence of SEQ ID NO: 1683, and a CDR-L3 comprising the amino acid sequence of SEQ ID NO: 1954.

[1276] In one aspect, the present disclosure provides an antibody or antigen-binding fragment thereof comprising at least one, at least two, or all three VH CDR sequences selected from: a. CDR-H1 comprising the amino acid sequence of SEQ ID NO: 599, b. CDR-H2 comprising the amino acid sequence of SEQ ID NO: 1141, c. CDR-H3 comprising the amino acid sequence of SEQ ID NO: 1683, and a VL comprising the amino acid sequence of SEQ ID NO: 328.

[1277] In one aspect, the present disclosure provides an antibody or antigen-binding fragment thereof comprising at least one, at least two, or all three VL CDR sequences selected from: a. CDR-L1 comprising the amino acid sequence of SEQ ID NO: 870, b. CDR-L2 comprising the amino acid sequence of SEQ ID NO: 1412, c. CDR-L3 comprising the amino acid sequence of SEQ ID NO: 1954, and a VH comprising the amino acid sequence of SEQ ID NO: 57.

[1278] In one aspect, an antibody or antigen-binding fragment thereof is provided, wherein the antibody or antigen-binding fragment thereof comprises a heavy chain variable domain (VH) having at least 90%, 91%, 92%, 93%, 94%, 95%, 96%, 97%, 98%, 99%, or 100% sequence identity to the amino acid sequence SEQ ID NO: 57. In some embodiments, a VH sequence having at least 90%, 91%, 92%, 93%, 94%, 95%, 96%, 97%, 98%, or 99% identity contains substitutions (e.g., conservative substitutions), insertions, or deletions relative to the reference sequence, but an antibody or antigen-binding fragment thereof comprising that sequence retains the ability to bind to same antigen as of the parent (e.g., cancer associated antigen). In some embodiments, a total of 1 to 10 amino acids have been substituted, inserted and/or deleted in the amino acid sequence SEQ ID NO: 57. In some embodiments, substitutions, insertions, or deletions occur in regions outside the CDRs (e.g., in the FRs). Optionally, the antibody or antigen-binding fragment thereof comprises the VH sequence SEQ ID NO: 57, including one or more post-translational modifications of that sequence. In a particular embodiment, the VH comprises one, two or three CDRs selected from: a. CDR-H1, comprising the amino acid sequence SEQ ID NO: 599, b. CDR-H2, comprising the amino acid sequence SEQ ID NO: 1141, and c. CDR-H3, comprising the amino acid sequence SEQ ID NO: 1683.

[1279] In one aspect, an antibody or antigen-binding fragment thereof is provided, wherein the antibody or antigen-binding fragment thereof comprises a light chain variable domain (VL) having at least 90%, 91%, 92%, 93%, 94%, 95%, 96%, 97%, 98%, 99%, or 100% sequence identity to the amino acid sequence SEQ ID NO: 328. In some embodiments, a VL sequence having at least 90%, 91%, 92%, 93%, 94%, 95%, 96%, 97%, 98%, or 99% identity contains substitutions (e.g., conservative substitutions), insertions, or deletions relative to the reference sequence, but an antibody or antigen-binding fragment thereof comprising that sequence retains the ability to bind to same antigen as the parent (e.g., cancer associated antigen). In some embodiments, a total of 1 to 10 amino acids have been substituted, inserted and/or deleted in the amino acid sequence SEQ ID NO: 328. In some embodiments, the substitutions, insertions, or deletions occur in regions outside the CDRs (e.g., in the FRs). Optionally, the antibody or antigen-binding fragment thereof comprises the VL sequence SEQ ID NO: 328, including one or more post-translational modifications of that sequence. In a particular embodiment, the VL comprises one, two or three CDRs selected from: a. CDR-L1, comprising the amino acid sequence SEQ ID NO: 870, b. CDR-L2, comprising the amino acid sequence SEQ ID NO: 1412, and c. CDR-L3, comprising the amino acid sequence SEQ ID NO: 1954.

[1280] In one aspect, an antibody or antigen-binding fragment thereof is provided, wherein the antibody or antigen-binding fragment thereof comprises a VH as in any of the embodiments provided above, and a VL as in any of the embodiments provided above. In some embodiments, the antibody or antigen-binding fragment thereof comprises the VH amino acid sequence of SEQ ID NO: 57, and the VL amino acid sequence of SEQ ID NO: 328, optionally including post-translational modifications of those sequences.

### TBRE1045

[1281] In one aspect, the present disclosure provides an antibody or antigen-binding fragment thereof comprising at least one or both variable regions selected from: a. VH comprising the amino acid sequence of SEQ ID NO: 58 and b. VL comprising the amino acid sequence of SEQ ID NO: 329.

[1282] In one aspect, the present disclosure provides an antibody or antigen-binding fragment thereof comprising at least one, two, three, four, five, or six CDRs selected from: a. CDR-H1 comprising the amino acid sequence of SEQ ID NO: 600, b. CDR-H2 comprising the amino acid sequence of SEQ ID NO: 1142, c. CDR-H3 comprising the amino acid sequence of SEQ ID NO: 1684, d. CDR-L1 comprising the amino acid sequence of SEQ ID NO: 871, e. CDR-L2 comprising the amino acid sequence of SEQ ID NO: 1413, and f. CDR-L3 comprising the amino acid sequence of SEQ ID NO: 1955.

[1283] In one aspect, the present disclosure provides an antibody or antigen-binding fragment thereof comprising: a. CDR-H1 comprising the amino acid sequence of SEQ ID NO: 600, b. CDR-H2 comprising the amino acid sequence of SEQ ID NO: 1142, c. CDR-H3 comprising the amino acid sequence of SEQ ID NO: 1684, d. CDR-L1 comprising the amino acid sequence of SEQ ID NO: 871, e. CDR-L2 comprising the amino acid sequence of SEQ ID NO: 1413, and f. CDR-L3 comprising the amino acid sequence of SEQ ID NO: 1955. In one aspect, the present disclosure provides an antibody or antigen-binding fragment thereof comprising a CDR-H3 comprising the amino acid sequence of SEQ ID NO: 1684, and a CDR-L3 comprising the amino acid sequence of SEQ ID NO: 1955.

[1284] In one aspect, the present disclosure provides an antibody or antigen-binding fragment thereof comprising at least one, at least two, or all three VH CDR sequences selected from: a. CDR-H1 comprising the amino acid sequence of SEQ ID NO: 600, b. CDR-H2 comprising the amino acid sequence of SEQ ID NO: 1142, c. CDR-H3 comprising the amino acid sequence of SEQ ID NO: 1684, and a VL comprising the amino acid sequence of SEQ ID NO: 329.

[1285] In one aspect, the present disclosure provides an antibody or antigen-binding fragment thereof comprising at least one, at least two, or all three VL CDR sequences selected from: a. CDR-L1 comprising the amino acid sequence of SEQ ID NO: 871, b. CDR-L2 comprising the amino acid sequence of SEQ ID NO: 1413, c. CDR-L3 comprising the amino acid sequence of SEQ ID NO: 1955, and a VH comprising the amino acid sequence of SEQ ID NO: 58.

[1286] In one aspect, an antibody or antigen-binding fragment thereof is provided, wherein the antibody or antigen-binding fragment thereof comprises a heavy chain variable domain (VH) having at least 90%, 91%, 92%, 93%, 94%, 95%, 96%, 97%, 98%, 99%, or 100% sequence identity to the amino acid sequence SEQ ID NO: 58. In some embodiments, a VH sequence having at least 90%, 91%, 92%, 93%, 94%, 95%, 96%, 97%, 98%, or 99% identity contains substitutions (e.g., conservative substitutions), insertions, or deletions relative to the reference sequence, but an antibody or antigen-binding fragment thereof comprising that sequence retains the ability to bind to same antigen as of the parent (e.g., cancer associated antigen). In some embodiments, a total of 1 to 10 amino acids have been substituted, inserted and/or deleted in the amino acid sequence SEQ ID NO: 58. In some embodiments, substitutions, insertions, or deletions occur in regions outside the CDRs (e.g., in the FRs). Optionally, the antibody or antigen-binding fragment thereof comprises the VH sequence SEQ ID NO: 58, including one or more post-translational modifications of that sequence. In a particular embodiment, the VH comprises one, two or three CDRs selected from: a. CDR-H1, comprising the amino acid sequence SEQ ID NO: 600, b. CDR-H2, comprising the amino acid sequence SEQ ID NO: 1142, and c. CDR-H3, comprising the amino acid sequence SEQ ID NO: 1684.

[1287] In one aspect, an antibody or antigen-binding fragment thereof is provided, wherein the antibody or antigen-binding fragment thereof comprises a light chain variable domain (VL) having at least 90%, 91%, 92%, 93%, 94%, 95%, 96%, 97%, 98%, 99%, or 100% sequence identity to the amino acid sequence SEQ ID NO: 329. In some embodiments, a VL sequence having at least 90%, 91%, 92%, 93%, 94%, 95%, 96%, 97%, 98%, or 99% identity contains substitutions (e.g., conservative substitutions), insertions, or deletions relative to the reference sequence, but an antibody or antigen-binding fragment thereof comprising that sequence retains the ability to bind to same antigen as the parent (e.g., cancer associated antigen). In some embodiments, a total of 1 to 10 amino acids have been substituted, inserted and/or deleted in the amino acid sequence SEQ ID NO: 329. In some embodiments, the substitutions, insertions, or deletions occur in regions outside the CDRs (e.g., in the FRs). Optionally, the antibody or antigen-binding fragment thereof comprises the VL sequence SEQ ID NO: 329, including one or more post-translational modifications of that sequence. In a particular embodiment, the VL comprises one, two or three CDRs selected from: a. CDR-L1, comprising the amino acid sequence SEQ ID NO: 871, b. CDR-L2, comprising the amino acid sequence SEQ ID NO: 1413, and c. CDR-L3, comprising the amino acid sequence SEQ ID NO: 1955.

[1288] In one aspect, an antibody or antigen-binding fragment thereof is provided, wherein the antibody or antigen-binding fragment thereof comprises a VH as in any of the embodiments provided above, and a VL as in any of the embodiments provided above. In some embodiments, the antibody or antigen-binding fragment thereof comprises the VH amino acid sequence of SEQ ID NO: 58, and the VL amino acid sequence of SEQ ID NO: 329, optionally including post-translational modifications of those sequences.

### TBRE1046

[1289] In one aspect, the present disclosure provides an antibody or antigen-binding fragment thereof comprising at least one or both variable regions selected from: a. VH comprising the amino acid sequence of SEQ ID NO: 59 and b. VL comprising the amino acid sequence of SEQ ID NO: 330.

[1290] In one aspect, the present disclosure provides an antibody or antigen-binding fragment thereof comprising at least one, two, three, four, five, or six CDRs selected from: a. CDR-H1 comprising the amino acid sequence of SEQ ID NO: 601, b. CDR-H2 comprising the amino acid sequence of SEQ ID NO: 1143, c. CDR-H3 comprising the amino acid sequence of SEQ ID NO: 1685, d. CDR-L1 comprising the amino acid sequence of SEQ ID NO: 872, e. CDR-L2 comprising the amino acid sequence of SEQ ID NO: 1414, and f. CDR-L3 comprising the amino acid sequence of SEQ ID NO: 1956.

[1291] In one aspect, the present disclosure provides an antibody or antigen-binding fragment thereof comprising at least one, at least two, or all three VH CDR sequences selected from: a. CDR-H1 comprising the amino acid sequence of SEQ ID NO: 601, b. CDR-H2 comprising the amino acid sequence of SEQ ID NO: 1143, c. CDR-H3 comprising the amino acid sequence of SEQ ID NO: 1685, and a VL comprising the amino acid sequence of SEQ ID NO: 330.

[1292] In one aspect, the present disclosure provides an antibody or antigen-binding fragment thereof comprising at least one, at least two, or all three VL CDR sequences selected from: a. CDR-L1 comprising the amino acid sequence of SEQ ID NO: 872, b. CDR-L2 comprising the amino acid sequence of SEQ ID NO: 1414, c. CDR-L3 comprising the amino acid sequence of SEQ ID NO: 1956, and a VH comprising the amino acid sequence of SEQ ID NO: 59.

[1293] In one aspect, an antibody or antigen-binding fragment thereof is provided, wherein the antibody or antigen-binding fragment thereof comprises a heavy chain variable domain (VH) having at least 90%, 91%, 92%, 93%, 94%, 95%, 96%, 97%, 98%, 99%, or 100% sequence identity to the amino acid sequence SEQ ID NO: 59. In some embodiments, a VH sequence having at least 90%, 91%, 92%, 93%, 94%, 95%, 96%, 97%, 98%, or 99% identity contains substitutions (e.g., conservative substitutions), insertions, or deletions relative to the reference sequence, but an antibody or antigen-binding fragment thereof comprising that sequence retains the ability to bind to same antigen as of the parent (e.g., cancer associated antigen). In some embodiments, a total of 1 to 10 amino acids have been substituted, inserted and/or deleted in the amino acid sequence SEQ ID NO: 59. In some embodiments, substitutions, insertions, or deletions occur in regions outside the CDRs (e.g., in the FRs). Optionally, the antibody or antigen-binding fragment thereof comprises the VH sequence SEQ ID NO: 59, including one or more post-translational modifications of that sequence. In a particular embodiment, the VH comprises one, two or three CDRs selected from: a. CDR-H1, comprising the amino acid sequence SEQ ID NO: 601, b. CDR-H2, comprising the amino acid sequence SEQ ID NO: 1143, and c. CDR-H3, comprising the amino acid sequence SEQ ID NO: 1685.

[1294] In one aspect, an antibody or antigen-binding fragment thereof is provided, wherein the antibody or antigen-binding fragment thereof comprises a light chain variable domain (VL) having at least 90%, 91%, 92%, 93%, 94%, 95%, 96%, 97%, 98%, 99%, or 100% sequence identity to the amino acid sequence SEQ ID NO: 330. In some embodiments, a VL sequence having at least 90%, 91%, 92%, 93%, 94%, 95%, 96%, 97%, 98%, or 99% identity contains substitutions (e.g., conservative substitutions), insertions, or deletions relative to the reference sequence, but an antibody or antigen-binding fragment thereof comprising that sequence retains the ability to bind to same antigen as the parent (e.g., cancer associated antigen). In some embodiments, a total of 1 to 10 amino acids have been substituted, inserted and/or deleted in the amino acid sequence SEQ ID NO: 330. In some embodiments, the substitutions, insertions, or deletions occur in regions outside the CDRs (e.g., in the FRs). Optionally, the antibody or antigen-binding fragment thereof comprises the VL sequence SEQ ID NO: 330, including one or more post-translational modifications of that sequence. In a particular embodiment, the VL comprises one, two or three CDRs selected from: a. CDR-L1, comprising the amino acid sequence SEQ ID NO: 872, b. CDR-L2, comprising the amino acid sequence SEQ ID NO: 1414, and c. CDR-L3, comprising the amino acid sequence SEQ ID NO: 1956.

[1295] In one aspect, an antibody or antigen-binding fragment thereof is provided, wherein the antibody or antigen-binding fragment thereof comprises a VH as in any of the embodiments provided above, and a VL as in any of the embodiments provided above. In some embodiments, the antibody or antigen-binding fragment thereof comprises the VH amino acid sequence of SEQ ID NO: 59, and the VL amino acid sequence of SEQ ID NO: 330, optionally including post-translational modifications of those sequences.

### TBRE1047

[1296] In one aspect, the present disclosure provides an antibody or antigen-binding fragment thereof comprising at least one or both variable regions selected from: a. VH comprising the amino acid sequence of SEQ ID NO: 60 and b. VL comprising the amino acid sequence of SEQ ID NO: 331.

[1297] In one aspect, the present disclosure provides an antibody or antigen-binding fragment thereof comprising at least one, two, three, four, five, or six CDRs selected from: a. CDR-H1 comprising the amino acid sequence of SEQ ID NO: 602, b. CDR-H2 comprising the amino acid sequence of SEQ ID NO: 1144, c. CDR-H3 comprising the amino acid sequence of SEQ ID NO: 1686, d. CDR-L1 comprising the amino acid sequence of SEQ ID NO: 873, e. CDR-L2 comprising the amino acid sequence of SEQ ID NO: 1415, and f. CDR-L3 comprising the amino acid sequence of SEQ ID NO: 1957.

[1298] In one aspect, the present disclosure provides an antibody or antigen-binding fragment thereof comprising a CDR-H3 comprising the amino acid sequence of SEQ ID NO: 1686, and a CDR-L3 comprising the amino acid sequence of SEQ ID NO: 1957.

[1299] In one aspect, the present disclosure provides an antibody or antigen-binding fragment thereof comprising a CDR-H3 comprising the amino acid sequence of SEQ ID NO: 1686, and a CDR-L3 comprising the amino acid sequence of SEQ ID NO: 1957.

[1300] In one aspect, the present disclosure provides an antibody or antigen-binding fragment thereof comprising at least one, at least two, or all three VH CDR sequences selected from: a. CDR-H1 comprising the amino acid sequence of SEQ ID NO: 602, b. CDR-H2 comprising the amino acid sequence of SEQ ID NO: 1144, c. CDR-H3 comprising the amino acid sequence of SEQ ID NO: 1686, and a VL comprising the amino acid sequence of SEQ ID NO: 331.

[1301] In one aspect, the present disclosure provides an antibody or antigen-binding fragment thereof comprising at least one, at least two, or all three VL CDR sequences selected from: a. CDR-L1 comprising the amino acid sequence of SEQ ID NO: 873, b. CDR-L2 comprising the amino acid sequence of SEQ ID NO: 1415, c. CDR-L3 comprising the amino acid sequence of SEQ ID NO: 1957, and a VH comprising the amino acid sequence of SEQ ID NO: 60.

[1302] In one aspect, an antibody or antigen-binding fragment thereof is provided, wherein the antibody or antigen-binding fragment thereof comprises a heavy chain variable domain (VH) having at least 90%, 91%, 92%, 93%, 94%, 95%, 96%, 97%, 98%, 99%, or 100% sequence identity to the amino acid sequence SEQ ID NO: 60. In some embodiments, a VH sequence having at least 90%, 91%, 92%, 93%, 94%, 95%, 96%, 97%, 98%, or 99% identity contains substitutions (e.g., conservative substitutions), insertions, or deletions relative to the reference sequence, but an antibody or antigen-binding fragment thereof comprising that sequence retains the ability to bind to same antigen as of the parent (e.g., cancer associated antigen). In some embodiments, a total of 1 to 10 amino acids have been substituted, inserted and/or deleted in the amino acid sequence SEQ ID NO: 60. In some embodiments, substitutions, insertions, or deletions occur in regions outside the CDRs (e.g., in the FRs). Optionally, the antibody or antigen-binding fragment thereof comprises the VH sequence SEQ ID NO: 60, including one or more post-translational modifications of that sequence. In a particular embodiment, the VH comprises one, two or three CDRs selected from: a. CDR-H1, comprising the amino acid sequence SEQ ID NO: 602, b. CDR-H2, comprising the amino acid sequence SEQ ID NO: 1144, and c. CDR-H3, comprising the amino acid sequence SEQ ID NO: 1686.

[1303] In one aspect, an antibody or antigen-binding fragment thereof is provided, wherein the antibody or antigen-binding fragment thereof comprises a light chain variable domain (VL) having at least 90%, 91%, 92%, 93%, 94%, 95%, 96%, 97%, 98%, 99%, or 100% sequence identity to the amino acid sequence SEQ ID NO: 331. In some embodiments, a VL sequence having at least 90%, 91%, 92%, 93%, 94%, 95%, 96%, 97%, 98%, or 99% identity contains substitutions (e.g., conservative substitutions), insertions, or deletions relative to the reference sequence, but an antibody or antigen-binding fragment thereof comprising that sequence retains the ability to bind to same antigen as the parent (e.g., cancer associated antigen). In some embodiments, a total of 1 to 10 amino acids have been substituted, inserted and/or deleted in the amino acid sequence SEQ ID NO: 331. In some embodiments, the substitutions, insertions, or deletions occur in regions outside the CDRs (e.g., in the FRs). Optionally, the antibody or antigen-binding fragment thereof comprises the VL sequence SEQ ID NO: 331, including one or more post-translational modifications of that sequence. In a particular embodiment, the VL comprises one, two or three CDRs selected from: a. CDR-L1, comprising the amino acid sequence SEQ ID NO: 873, b. CDR-L2, comprising the amino acid sequence SEQ ID NO: 1415, and c. CDR-L3, comprising the amino acid sequence SEQ ID NO: 1957.

[1304] In one aspect, an antibody or antigen-binding fragment thereof is provided, wherein the antibody or antigen-binding fragment thereof comprises a VH as in any of the embodiments provided above, and a VL as in any of the embodiments provided above. In some embodiments, the antibody or antigen-binding fragment thereof comprises the VH amino acid sequence of SEQ ID NO: 60, and the VL amino acid sequence of SEQ ID NO: 331, optionally including post-translational modifications of those sequences.

### TBRE1048

[1305] In one aspect, the present disclosure provides an antibody or antigen-binding fragment thereof comprising at least one or both variable regions selected from: a. VH comprising the amino acid sequence of SEQ ID NO: 61 and b. VL comprising the amino acid sequence of SEQ ID NO: 332.

[1306] In one aspect, the present disclosure provides an antibody or antigen-binding fragment thereof comprising at least one, two, three, four, five, or six CDRs selected from: a. CDR-H1 comprising the amino acid sequence of SEQ ID NO: 603, b. CDR-H2 comprising the amino acid sequence of SEQ ID NO: 1145, c. CDR-H3 comprising the amino acid sequence of SEQ ID NO: 1687, d. CDR-L1 comprising the amino acid sequence of SEQ ID NO: 874, e. CDR-L2 comprising the amino acid sequence of SEQ ID NO: 1416, and f. CDR-L3 comprising the amino acid sequence of SEQ ID NO: 1958.

[1307] In one aspect, the present disclosure provides an antibody or antigen-binding fragment thereof comprising a CDR-H3 comprising the amino acid sequence of SEQ ID NO: 1687, and a CDR-L3 comprising the amino acid sequence of SEQ ID NO: 1958.

[1308] In one aspect, the present disclosure provides an antibody or antigen-binding fragment thereof comprising at least one, at least two, or all three VH CDR sequences selected from: a. CDR-H1 comprising the amino acid sequence of SEQ ID NO: 603, b. CDR-H2 comprising the amino acid sequence of SEQ ID NO: 1145, c. CDR-H3 comprising the amino acid sequence of SEQ ID NO: 1687, and a VL comprising the amino acid sequence of SEQ ID NO: 332.

[1309] In one aspect, the present disclosure provides an antibody or antigen-binding fragment thereof comprising at least one, at least two, or all three VL CDR sequences selected from: a. CDR-L1 comprising the amino acid sequence of SEQ ID NO: 874, b. CDR-L2 comprising the amino acid sequence of SEQ ID NO: 1416, c. CDR-L3 comprising the amino acid sequence of SEQ ID NO: 1958, and a VH comprising the amino acid sequence of SEQ ID NO: 61.

[1310] In one aspect, an antibody or antigen-binding fragment thereof is provided, wherein the antibody or antigen-binding fragment thereof comprises a heavy chain variable domain (VH) having at least 90%, 91%, 92%, 93%, 94%, 95%, 96%, 97%, 98%, 99%, or 100% sequence identity to the amino acid sequence SEQ ID NO: 61. In some embodiments, a VH sequence having at least 90%, 91%, 92%, 93%, 94%, 95%, 96%, 97%, 98%, or 99% identity contains substitutions (e.g., conservative substitutions), insertions, or deletions relative to the reference sequence, but an antibody or antigen-binding fragment thereof comprising that sequence retains the ability to bind to same antigen as of the parent (e.g., cancer associated antigen). In some embodiments, a total of 1 to 10 amino acids have been substituted, inserted and/or deleted in the amino acid sequence SEQ ID NO: 61. In some embodiments, substitutions, insertions, or deletions occur in regions outside the CDRs (e.g., in the FRs). Optionally, the antibody or antigen-binding fragment thereof comprises the VH sequence SEQ ID NO: 61, including one or more post-translational modifications of that sequence. In a particular embodiment, the VH comprises one, two or three CDRs selected from: a. CDR-H1, comprising the amino acid sequence SEQ ID NO: 603, b. CDR-H2, comprising the amino acid sequence SEQ ID NO: 1145, and c. CDR-H3, comprising the amino acid sequence SEQ ID NO: 1687.

[1311] In one aspect, an antibody or antigen-binding fragment thereof is provided, wherein the antibody or antigen-binding fragment thereof comprises a light chain variable domain (VL) having at least 90%, 91%, 92%, 93%, 94%, 95%, 96%, 97%, 98%, 99%, or 100% sequence identity to the amino acid sequence SEQ ID NO: 332. In some embodiments, a VL sequence having at least 90%, 91%, 92%, 93%, 94%, 95%, 96%, 97%, 98%, or 99% identity contains substitutions (e.g., conservative substitutions), insertions, or deletions relative to the reference sequence, but an antibody or antigen-binding fragment thereof comprising that sequence retains the ability to bind to same antigen as the parent (e.g., cancer associated antigen). In some embodiments, a total of 1 to 10 amino acids have been substituted, inserted and/or deleted in the amino acid sequence SEQ ID NO: 332. In some embodiments, the substitutions, insertions, or deletions occur in regions outside the CDRs (e.g., in the FRs). Optionally, the antibody or antigen-binding fragment thereof comprises the VL sequence SEQ ID NO: 332, including one or more post-translational modifications of that sequence. In a particular embodiment, the VL comprises one, two or three CDRs selected from: a. CDR-L1, comprising the amino acid sequence SEQ ID NO: 874, b. CDR-L2, comprising the amino acid sequence SEQ ID NO: 1416, and c. CDR-L3, comprising the amino acid sequence SEQ ID NO: 1958.

[1312] In one aspect, an antibody or antigen-binding fragment thereof is provided, wherein the antibody or antigen-binding fragment thereof comprises a VH as in any of the embodiments provided above, and a VL as in any of the embodiments provided above. In some embodiments, the antibody or antigen-binding fragment thereof comprises the VH amino acid sequence of SEQ ID NO: 61, and the VL amino acid sequence of SEQ ID NO: 332, optionally including post-translational modifications of those sequences.

### TBRE1049

[1313] In one aspect, the present disclosure provides an antibody or antigen-binding fragment thereof comprising at least one or both variable regions selected from: a. VH comprising the amino acid sequence of SEQ ID NO: 62 and b. VL comprising the amino acid sequence of SEQ ID NO: 333.

[1314] In one aspect, the present disclosure provides an antibody or antigen-binding fragment thereof comprising at least one, two, three, four, five, or six CDRs selected from: a. CDR-H1 comprising the amino acid sequence of SEQ ID NO: 604, b. CDR-H2 comprising the amino acid sequence of SEQ ID NO: 1146, c. CDR-H3 comprising the amino acid sequence of SEQ ID NO: 1688, d. CDR-L1 comprising the amino acid sequence of SEQ ID NO: 875, e. CDR-L2 comprising the amino acid sequence of SEQ ID NO: 1417, and f. CDR-L3 comprising the amino acid sequence of SEQ ID NO: 1959.

[1315] In one aspect, the present disclosure provides an antibody or antigen-binding fragment thereof comprising: a. CDR-H1 comprising the amino acid sequence of SEQ ID NO: 604, b. CDR-H2 comprising the amino acid sequence of SEQ ID NO: 1146, c. CDR-H3 comprising the amino acid sequence of SEQ ID NO: 1688, d. CDR-L1 comprising the amino acid sequence of SEQ ID NO: 875, e. CDR-L2 comprising the amino acid sequence of SEQ ID NO: 1417, and f. CDR-L3 comprising the amino acid sequence of SEQ ID NO: 1959.

[1316] In one aspect, the present disclosure provides an antibody or antigen-binding fragment thereof comprising a CDR-H3 comprising the amino acid sequence of SEQ ID NO: 1688, and a CDR-L3 comprising the amino acid sequence of SEQ ID NO: 1959.

[1317] In one aspect, the present disclosure provides an antibody or antigen-binding fragment thereof comprising at least one, at least two, or all three VH CDR sequences selected from: a. CDR-H1 comprising the amino acid sequence of SEQ ID NO: 604, b. CDR-H2 comprising the amino acid sequence of SEQ ID NO: 1146, c. CDR-H3 comprising the amino acid sequence of SEQ ID NO: 1688, and a VL comprising the amino acid sequence of SEQ ID NO: 333.

[1318] In one aspect, the present disclosure provides an antibody or antigen-binding fragment thereof comprising at least one, at least two, or all three VL CDR sequences selected from: a. CDR-L1 comprising the amino acid sequence of SEQ ID NO: 875, b. CDR-L2 comprising the amino acid sequence of SEQ ID NO: 1417, c. CDR-L3 comprising the amino acid sequence of SEQ ID NO: 1959, and a VH comprising the amino acid sequence of SEQ ID NO: 62.

[1319] In one aspect, an antibody or antigen-binding fragment thereof is provided, wherein the antibody or antigen-binding fragment thereof comprises a heavy chain variable domain (VH) having at least 90%, 91%, 92%, 93%, 94%, 95%, 96%, 97%, 98%, 99%, or 100% sequence identity to the amino acid sequence SEQ ID NO: 62. In some embodiments, a VH sequence having at least 90%, 91%, 92%, 93%, 94%, 95%, 96%, 97%, 98%, or 99% identity contains substitutions (e.g., conservative substitutions), insertions, or deletions relative to the reference sequence, but an antibody or antigen-binding fragment thereof comprising that sequence retains the ability to bind to same antigen as of the parent (e.g., cancer associated antigen). In some embodiments, a total of 1 to 10 amino acids have been substituted, inserted and/or deleted in the amino acid sequence SEQ ID NO: 62. In some embodiments, substitutions, insertions, or deletions occur in regions outside the CDRs (e.g., in the FRs). Optionally, the antibody or antigen-binding fragment thereof comprises the VH sequence SEQ ID NO: 62, including one or more post-translational modifications of that sequence. In a particular embodiment, the VH comprises one, two or three CDRs selected from: a. CDR-H1, comprising the amino acid sequence SEQ ID NO: 604, b. CDR-H2, comprising the amino acid sequence SEQ ID NO: 1146, and c. CDR-H3, comprising the amino acid sequence SEQ ID NO: 1688.

[1320] In one aspect, an antibody or antigen-binding fragment thereof is provided, wherein the antibody or antigen-binding fragment thereof comprises a light chain variable domain (VL) having at least 90%, 91%, 92%, 93%, 94%, 95%, 96%, 97%, 98%, 99%, or 100% sequence identity to the amino acid sequence SEQ ID NO: 333. In some embodiments, a VL sequence having at least 90%, 91%, 92%, 93%, 94%, 95%, 96%, 97%, 98%, or 99% identity contains substitutions (e.g., conservative substitutions), insertions, or deletions relative to the reference sequence, but an antibody or antigen-binding fragment thereof comprising that sequence retains the ability to bind to same antigen as the parent (e.g., cancer associated antigen). In some embodiments, a total of 1 to 10 amino acids have been substituted, inserted and/or deleted in the amino acid sequence SEQ ID NO: 333. In some embodiments, the substitutions, insertions, or deletions occur in regions outside the CDRs (e.g., in the FRs). Optionally, the antibody or antigen-binding fragment thereof comprises the VL sequence SEQ ID NO: 333, including one or more post-translational modifications of that sequence. In a particular embodiment, the VL comprises one, two or three CDRs selected from: a. CDR-L1, comprising the amino acid sequence SEQ ID NO: 875, b. CDR-L2, comprising the amino acid sequence SEQ ID NO: 1417, and c. CDR-L3, comprising the amino acid sequence SEQ ID NO: 1959.

[1321] In one aspect, an antibody or antigen-binding fragment thereof is provided, wherein the antibody or antigen-binding fragment thereof comprises a VH as in any of the embodiments provided above, and a VL as in any of the embodiments provided above. In some embodiments, the antibody or antigen-binding fragment thereof comprises the VH amino acid sequence of SEQ ID NO: 62, and the VL amino acid sequence of SEQ ID NO: 333, optionally including post-translational modifications of those sequences.

### TBRE1050

[1322] In one aspect, the present disclosure provides an antibody or antigen-binding fragment thereof comprising at least one or both variable regions selected from: a. VH comprising the amino acid sequence of SEQ ID NO: 63 and b. VL comprising the amino acid sequence of SEQ ID NO: 334.

[1323] In one aspect, the present disclosure provides an antibody or antigen-binding fragment thereof comprising at least one, two, three, four, five, or six CDRs selected from: a. CDR-H1 comprising the amino acid sequence of SEQ ID NO: 605, b. CDR-H2 comprising the amino acid sequence of SEQ ID NO: 1147, c. CDR-H3 comprising the amino acid sequence of SEQ ID NO: 1689, d. CDR-L1 comprising the amino acid sequence of SEQ ID NO: 876, e. CDR-L2 comprising the amino acid sequence of SEQ ID NO: 1418, and f. CDR-L3 comprising the amino acid sequence of SEQ ID NO: 1960.

[1324] In one aspect, the present disclosure provides an antibody or antigen-binding fragment thereof comprising: a. CDR-H1 comprising the amino acid sequence of SEQ ID NO: 605, b. CDR-H2 comprising the amino acid sequence of SEQ ID NO: 1147, c. CDR-H3 comprising the amino acid sequence of SEQ ID NO: 1689, d. CDR-L1 comprising the amino acid sequence of SEQ ID NO: 876, e. CDR-L2 comprising the amino acid sequence of SEQ ID NO: 1418, and f. CDR-L3 comprising the amino acid sequence of SEQ ID NO: 1960. In one aspect, the present disclosure provides an antibody or antigen-binding fragment thereof comprising a CDR-H3 comprising the amino acid sequence of SEQ ID NO: 1689, and a CDR-L3 comprising the amino acid sequence of SEQ ID NO: 1960.

[1325] In one aspect, the present disclosure provides an antibody or antigen-binding fragment thereof comprising at least one, at least two, or all three VH CDR sequences selected from: a. CDR-H1 comprising the amino acid sequence of SEQ ID NO: 605, b. CDR-H2 comprising the amino acid sequence of SEQ ID NO: 1147, c. CDR-H3 comprising the amino acid sequence of SEQ ID NO: 1689, and a VL comprising the amino acid sequence of SEQ ID NO: 334.

[1326] In one aspect, the present disclosure provides an antibody or antigen-binding fragment thereof comprising at least one, at least two, or all three VL CDR sequences selected from: a. CDR-L1 comprising the amino acid sequence of SEQ ID NO: 876, b. CDR-L2 comprising the amino acid sequence of SEQ ID NO: 1418, c. CDR-L3 comprising the amino acid sequence of SEQ ID NO: 1960, and a VH comprising the amino acid sequence of SEQ ID NO: 63.

[1327] In one aspect, an antibody or antigen-binding fragment thereof is provided, wherein the antibody or antigen-binding fragment thereof comprises a heavy chain variable domain (VH) having at least 90%, 91%, 92%, 93%, 94%, 95%, 96%, 97%, 98%, 99%, or 100% sequence identity to the amino acid sequence SEQ ID NO: 63. In some embodiments, a VH sequence having at least 90%, 91%, 92%, 93%, 94%, 95%, 96%, 97%, 98%, or 99% identity contains substitutions (e.g., conservative substitutions), insertions, or deletions relative to the reference sequence, but an antibody or antigen-binding fragment thereof comprising that sequence retains the ability to bind to same antigen as of the parent (e.g., cancer associated antigen). In some embodiments, a total of 1 to 10 amino acids have been substituted, inserted and/or deleted in the amino acid sequence SEQ ID NO: 63. In some embodiments, substitutions, insertions, or deletions occur in regions outside the CDRs (e.g., in the FRs). Optionally, the antibody or antigen-binding fragment thereof comprises the VH sequence SEQ ID NO: 63, including one or more post-translational modifications of that sequence. In a particular embodiment, the VH comprises one, two or three CDRs selected from: a. CDR-H1, comprising the amino acid sequence SEQ ID NO: 605, b. CDR-H2, comprising the amino acid sequence SEQ ID NO: 1147, and c. CDR-H3, comprising the amino acid sequence SEQ ID NO: 1689.

[1328] In one aspect, an antibody or antigen-binding fragment thereof is provided, wherein the antibody or antigen-binding fragment thereof comprises a light chain variable domain (VL) having at least 90%, 91%, 92%, 93%, 94%, 95%, 96%, 97%, 98%, 99%, or 100% sequence identity to the amino acid sequence SEQ ID NO: 334. In some embodiments, a VL sequence having at least 90%, 91%, 92%, 93%, 94%, 95%, 96%, 97%, 98%, or 99% identity contains substitutions (e.g., conservative substitutions), insertions, or deletions relative to the reference sequence, but an antibody or antigen-binding fragment thereof comprising that sequence retains the ability to bind to same antigen as the parent (e.g., cancer associated antigen). In some embodiments, a total of 1 to 10 amino acids have been substituted, inserted and/or deleted in the amino acid sequence SEQ ID NO: 334. In some embodiments, the substitutions, insertions, or deletions occur in regions outside the CDRs (e.g., in the FRs). Optionally, the antibody or antigen-binding fragment thereof comprises the VL sequence SEQ ID NO: 334, including one or more post-translational modifications of that sequence. In a particular embodiment, the VL comprises one, two or three CDRs selected from: a. CDR-L1, comprising the amino acid sequence SEQ ID NO: 876, b. CDR-L2, comprising the amino acid sequence SEQ ID NO: 1418, and c. CDR-L3, comprising the amino acid sequence SEQ ID NO: 1960.

[1329] In one aspect, an antibody or antigen-binding fragment thereof is provided, wherein the antibody or antigen-binding fragment thereof comprises a VH as in any of the embodiments provided above, and a VL as in any of the embodiments provided above. In some embodiments, the antibody or antigen-binding fragment thereof comprises the VH amino acid sequence of SEQ ID NO: 63, and the VL amino acid sequence of SEQ ID NO: 334, optionally including post-translational modifications of those sequences.

### TBRE1051

[1330] In one aspect, the present disclosure provides an antibody or antigen-binding fragment thereof comprising at least one or both variable regions selected from: a. VH comprising the amino acid sequence of SEQ ID NO: 64 and b. VL comprising the amino acid sequence of SEQ ID NO: 335.

[1331] In one aspect, the present disclosure provides an antibody or antigen-binding fragment thereof comprising at least one, two, three, four, five, or six CDRs selected from: a. CDR-H1 comprising the amino acid sequence of SEQ ID NO: 606, b. CDR-H2 comprising the amino acid sequence of SEQ ID NO: 1148, c. CDR-H3 comprising the amino acid sequence of SEQ ID NO: 1690, d. CDR-L1 comprising the amino acid sequence of SEQ ID NO: 877, e. CDR-L2 comprising the amino acid sequence of SEQ ID NO: 1419, and f. CDR-L3 comprising the amino acid sequence of SEQ ID NO: 1961.

[1332] In one aspect, the present disclosure provides an antibody or antigen-binding fragment thereof comprising a CDR-H3 comprising the amino acid sequence of SEQ ID NO: 1690 and a CDR-L3 comprising the amino acid sequence of SEQ ID NO: 1961. In one aspect, the present disclosure provides an antibody or antigen-binding fragment thereof comprising: a. CDR-H1 comprising the amino acid sequence of SEQ ID NO: 606, b. CDR-H2 comprising the amino acid sequence of SEQ ID NO: 1148, c. CDR-H3 comprising the amino acid sequence of SEQ ID NO: 1690, d. CDR-L1 comprising the amino acid sequence of SEQ ID NO: 877, e. CDR-L2 comprising the amino acid sequence of SEQ ID NO: 1419, and f. CDR-L3 comprising the amino acid sequence of SEQ ID NO: 1961.

[1333] In one aspect, the present disclosure provides an antibody or antigen-binding fragment thereof comprising at least one, at least two, or all three VH CDR sequences selected from: a. CDR-H1 comprising the amino acid sequence of SEQ ID NO: 606, b. CDR-H2 comprising the amino acid sequence of SEQ ID NO: 1148, c. CDR-H3 comprising the amino acid sequence of SEQ ID NO: 1690, and a VL comprising the amino acid sequence of SEQ ID NO: 335.

[1334] In one aspect, the present disclosure provides an antibody or antigen-binding fragment thereof comprising at least one, at least two, or all three VL CDR sequences selected from: a. CDR-L1 comprising the amino acid sequence of SEQ ID NO: 877, b. CDR-L2 comprising the amino acid sequence of SEQ ID NO: 1419, c. CDR-L3 comprising the amino acid sequence of SEQ ID NO: 1961, and a VH comprising the amino acid sequence of SEQ ID NO: 64.

[1335] In one aspect, an antibody or antigen-binding fragment thereof is provided, wherein the antibody or antigen-binding fragment thereof comprises a heavy chain variable domain (VH) having at least 90%, 91%, 92%, 93%, 94%, 95%, 96%, 97%, 98%, 99%, or 100% sequence identity to the amino acid sequence SEQ ID NO: 64. In some embodiments, a VH sequence having at least 90%, 91%, 92%, 93%, 94%, 95%, 96%, 97%, 98%, or 99% identity contains substitutions (e.g., conservative substitutions), insertions, or deletions relative to the reference sequence, but an antibody or antigen-binding fragment thereof comprising that sequence retains the ability to bind to same antigen as of the parent (e.g., cancer associated antigen). In some embodiments, a total of 1 to 10 amino acids have been substituted, inserted and/or deleted in the amino acid sequence SEQ ID NO: 64. In some embodiments, substitutions, insertions, or deletions occur in regions outside the CDRs (e.g., in the FRs). Optionally, the antibody or antigen-binding fragment thereof comprises the VH sequence SEQ ID NO: 64, including one or more post-translational modifications of that sequence. In a particular embodiment, the VH comprises one, two or three CDRs selected from: a. CDR-H1, comprising the amino acid sequence SEQ ID NO: 606, b. CDR-H2, comprising the amino acid sequence SEQ ID NO: 1148, and c. CDR-H3, comprising the amino acid sequence SEQ ID NO: 1690.

[1336] In one aspect, an antibody or antigen-binding fragment thereof is provided, wherein the antibody or antigen-binding fragment thereof comprises a light chain variable domain (VL) having at least 90%, 91%, 92%, 93%, 94%, 95%, 96%, 97%, 98%, 99%, or 100% sequence identity to the amino acid sequence SEQ ID NO: 335. In some embodiments, a VL sequence having at least 90%, 91%, 92%, 93%, 94%, 95%, 96%, 97%, 98%, or 99% identity contains substitutions (e.g., conservative substitutions), insertions, or deletions relative to the reference sequence, but an antibody or antigen-binding fragment thereof comprising that sequence retains the ability to bind to same antigen as the parent (e.g., cancer associated antigen). In some embodiments, a total of 1 to 10 amino acids have been substituted, inserted and/or deleted in the amino acid sequence SEQ ID NO: 335. In some embodiments, the substitutions, insertions, or deletions occur in regions outside the CDRs (e.g., in the FRs). Optionally, the antibody or antigen-binding fragment thereof comprises the VL sequence SEQ ID NO: 335, including one or more post-translational modifications of that sequence. In a particular embodiment, the VL comprises one, two or three CDRs selected from: a. CDR-L1, comprising the amino acid sequence SEQ ID NO: 877, b. CDR-L2, comprising the amino acid sequence SEQ ID NO: 1419, and c. CDR-L3, comprising the amino acid sequence SEQ ID NO: 1961.

[1337] In one aspect, an antibody or antigen-binding fragment thereof is provided, wherein the antibody or antigen-binding fragment thereof comprises a VH as in any of the embodiments provided above, and a VL as in any of the embodiments provided above. In some embodiments, the antibody or antigen-binding fragment thereof comprises the VH amino acid sequence of SEQ ID NO: 64, and the VL amino acid sequence of SEQ ID NO: 335, optionally including post-translational modifications of those sequences.

### TBRE1052

[1338] In one aspect, the present disclosure provides an antibody or antigen-binding fragment thereof comprising at least one or both variable regions selected from: a. VH comprising the amino acid sequence of SEQ ID NO: 65 and b. VL comprising the amino acid sequence of SEQ ID NO: 336.

[1339] In one aspect, the present disclosure provides an antibody or antigen-binding fragment thereof comprising at least one, two, three, four, five, or six CDRs selected from: a. CDR-H1 comprising the amino acid sequence of SEQ ID NO: 607, b. CDR-H2 comprising the amino acid sequence of SEQ ID NO: 1149, c. CDR-H3 comprising the amino acid sequence of SEQ ID NO: 1691, d. CDR-L1 comprising the amino acid sequence of SEQ ID NO: 878, e. CDR-L2 comprising the amino acid sequence of SEQ ID NO: 1420, and f. CDR-L3 comprising the amino acid sequence of SEQ ID NO: 1962.

[1340] In one aspect, the present disclosure provides an antibody or antigen-binding fragment thereof comprising a CDR-H3 comprising the amino acid sequence of SEQ ID NO: 1691, and a CDR-L3 comprising the amino acid sequence of SEQ ID NO: 1962.

[1341] In one aspect, the present disclosure provides an antibody or antigen-binding fragment thereof comprising: a. CDR-H1 comprising the amino acid sequence of SEQ ID NO: 607, b. CDR-H2 comprising the amino acid sequence of SEQ ID NO: 1149, c. CDR-H3 comprising the amino acid sequence of SEQ ID NO: 1691, d. CDR-L1 comprising the amino acid sequence of SEQ ID NO: 878, e. CDR-L2 comprising the amino acid sequence of SEQ ID NO: 1420, and f. CDR-L3 comprising the amino acid sequence of SEQ ID NO: 1962.

[1342] In one aspect, the present disclosure provides an antibody or antigen-binding fragment thereof comprising at least one, at least two, or all three VH CDR sequences selected from: a. CDR-H1 comprising the amino acid sequence of SEQ ID NO: 607, b. CDR-H2 comprising the amino acid sequence of SEQ ID NO: 1149, c. CDR-H3 comprising the amino acid sequence of SEQ ID NO: 1691, and a VL comprising the amino acid sequence of SEQ ID NO: 336.

[1343] In one aspect, the present disclosure provides an antibody or antigen-binding fragment thereof comprising at least one, at least two, or all three VL CDR sequences selected from: a. CDR-L1 comprising the amino acid sequence of SEQ ID NO: 878, b. CDR-L2 comprising the amino acid sequence of SEQ ID NO: 1420, c. CDR-L3 comprising the amino acid sequence of SEQ ID NO: 1962, and a VH comprising the amino acid sequence of SEQ ID NO: 65.

[1344] In one aspect, an antibody or antigen-binding fragment thereof is provided, wherein the antibody or antigen-binding fragment thereof comprises a heavy chain variable domain (VH) having at least 90%, 91%, 92%, 93%, 94%, 95%, 96%, 97%, 98%, 99%, or 100% sequence identity to the amino acid sequence SEQ ID NO: 65. In some embodiments, a VH sequence having at least 90%, 91%, 92%, 93%, 94%, 95%, 96%, 97%, 98%, or 99% identity contains substitutions (e.g., conservative substitutions), insertions, or deletions relative to the reference sequence, but an antibody or antigen-binding fragment thereof comprising that sequence retains the ability to bind to same antigen as of the parent (e.g., cancer associated antigen). In some embodiments, a total of 1 to 10 amino acids have been substituted, inserted and/or deleted in the amino acid sequence SEQ ID NO: 65. In some embodiments, substitutions, insertions, or deletions occur in regions outside the CDRs (e.g., in the FRs). Optionally, the antibody or antigen-binding fragment thereof comprises the VH sequence SEQ ID NO: 65, including one or more post-translational modifications of that sequence. In a particular embodiment, the VH comprises one, two or three CDRs selected from: a. CDR-H1, comprising the amino acid sequence SEQ ID NO: 607, b. CDR-H2, comprising the amino acid sequence SEQ ID NO: 1149, and c. CDR-H3, comprising the amino acid sequence SEQ ID NO: 1691.

[1345] In one aspect, an antibody or antigen-binding fragment thereof is provided, wherein the antibody or antigen-binding fragment thereof comprises a light chain variable domain (VL) having at least 90%, 91%, 92%, 93%, 94%, 95%, 96%, 97%, 98%, 99%, or 100% sequence identity to the amino acid sequence SEQ ID NO: 336. In some embodiments, a VL sequence having at least 90%, 91%, 92%, 93%, 94%, 95%, 96%, 97%, 98%, or 99% identity contains substitutions (e.g., conservative substitutions), insertions, or deletions relative to the reference sequence, but an antibody or antigen-binding fragment thereof comprising that sequence retains the ability to bind to same antigen as the parent (e.g., cancer associated antigen). In some embodiments, a total of 1 to 10 amino acids have been substituted, inserted and/or deleted in the amino acid sequence SEQ ID NO: 336. In some embodiments, the substitutions, insertions, or deletions occur in regions outside the CDRs (e.g., in the FRs). Optionally, the antibody or antigen-binding fragment thereof comprises the VL sequence SEQ ID NO: 336, including one or more post-translational modifications of that sequence. In a particular embodiment, the VL comprises one, two or three CDRs selected from: a. CDR-L1, comprising the amino acid sequence SEQ ID NO: 878, b. CDR-L2, comprising the amino acid sequence SEQ ID NO: 1420, and c. CDR-L3, comprising the amino acid sequence SEQ ID NO: 1962.

[1346] In one aspect, an antibody or antigen-binding fragment thereof is provided, wherein the antibody or antigen-binding fragment thereof comprises a VH as in any of the embodiments provided above, and a VL as in any of the embodiments provided above. In some embodiments, the antibody or antigen-binding fragment thereof comprises the VH amino acid sequence of SEQ ID NO: 65, and the VL amino acid sequence of SEQ ID NO: 336, optionally including post-translational modifications of those sequences.

### TBRE1053

[1347] In one aspect, the present disclosure provides an antibody or antigen-binding fragment thereof comprising at least one or both variable regions selected from: a. VH comprising the amino acid sequence of SEQ ID NO: 66 and b. VL comprising the amino acid sequence of SEQ ID NO: 337.

[1348] In one aspect, the present disclosure provides an antibody or antigen-binding fragment thereof comprising at least one, two, three, four, five, or six CDRs selected from: a. CDR-H1 comprising the amino acid sequence of SEQ ID NO: 608, b. CDR-H2 comprising the amino acid sequence of SEQ ID NO: 1150, c. CDR-H3 comprising the amino acid sequence of SEQ ID NO: 1692, d. CDR-L1 comprising the amino acid sequence of SEQ ID NO: 879, e. CDR-L2 comprising the amino acid sequence of SEQ ID NO: 1421, and f. CDR-L3 comprising the amino acid sequence of SEQ ID NO: 1963.

[1349] In one aspect, the present disclosure provides an antibody or antigen-binding fragment thereof comprising a CDR-H3 comprising the amino acid sequence of SEQ ID NO: 1692, and a CDR-L3 comprising the amino acid sequence of SEQ ID NO: 1963.

[1350] In one aspect, the present disclosure provides an antibody or antigen-binding fragment thereof comprising: a. CDR-H1 comprising the amino acid sequence of SEQ ID NO: 608, b. CDR-H2 comprising the amino acid sequence of SEQ ID NO: 1150, c. CDR-H3 comprising the amino acid sequence of SEQ ID NO: 1692, d. CDR-L1 comprising the amino acid sequence of SEQ ID NO: 879, e. CDR-L2 comprising the amino acid sequence of SEQ ID NO: 1421, and f. CDR-L3 comprising the amino acid sequence of SEQ ID NO: 1963.

[1351] In one aspect, the present disclosure provides an antibody or antigen-binding fragment thereof comprising at least one, at least two, or all three VH CDR sequences selected from: a. CDR-H1 comprising the amino acid sequence of SEQ ID NO: 608, b. CDR-H2 comprising the amino acid sequence of SEQ ID NO: 1150, c. CDR-H3 comprising the amino acid sequence of SEQ ID NO: 1692, and a VL comprising the amino acid sequence of SEQ ID NO: 337.

[1352] In one aspect, the present disclosure provides an antibody or antigen-binding fragment thereof comprising at least one, at least two, or all three VL CDR sequences selected from: a. CDR-L1 comprising the amino acid sequence of SEQ ID NO: 879, b. CDR-L2 comprising the amino acid sequence of SEQ ID NO: 1421, c. CDR-L3 comprising the amino acid sequence of SEQ ID NO: 1963, and a VH comprising the amino acid sequence of SEQ ID NO: 66.

[1353] In one aspect, an antibody or antigen-binding fragment thereof is provided, wherein the antibody or antigen-binding fragment thereof comprises a heavy chain variable domain (VH) having at least 90%, 91%, 92%, 93%, 94%, 95%, 96%, 97%, 98%, 99%, or 100% sequence identity to the amino acid sequence SEQ ID NO: 66. In some embodiments, a VH sequence having at least 90%, 91%, 92%, 93%, 94%, 95%, 96%, 97%, 98%, or 99% identity contains substitutions (e.g., conservative substitutions), insertions, or deletions relative to the reference sequence, but an antibody or antigen-binding fragment thereof comprising that sequence retains the ability to bind to same antigen as of the parent (e.g., cancer associated antigen). In some embodiments, a total of 1 to 10 amino acids have been substituted, inserted and/or deleted in the amino acid sequence SEQ ID NO: 66. In some embodiments, substitutions, insertions, or deletions occur in regions outside the CDRs (e.g., in the FRs). Optionally, the antibody or antigen-binding fragment thereof comprises the VH sequence SEQ ID NO: 66, including one or more post-translational modifications of that sequence. In a particular embodiment, the VH comprises one, two or three CDRs selected from: a. CDR-H1, comprising the amino acid sequence SEQ ID NO: 608, b. CDR-H2, comprising the amino acid sequence SEQ ID NO: 1150, and a. CDR-H3, comprising the amino acid sequence SEQ ID NO: 1692.

[1354] In one aspect, an antibody or antigen-binding fragment thereof is provided, wherein the antibody or antigen-binding fragment thereof comprises a light chain variable domain (VL) having at least 90%, 91%, 92%, 93%, 94%, 95%, 96%, 97%, 98%, 99%, or 100% sequence identity to the amino acid sequence SEQ ID NO: 337. In some embodiments, a VL sequence having at least 90%, 91%, 92%, 93%, 94%, 95%, 96%, 97%, 98%, or 99% identity contains substitutions (e.g., conservative substitutions), insertions, or deletions relative to the reference sequence, but an antibody or antigen-binding fragment thereof comprising that sequence retains the ability to bind to same antigen as the parent (e.g., cancer associated antigen). In some embodiments, a total of 1 to 10 amino acids have been substituted, inserted and/or deleted in the amino acid sequence SEQ ID NO: 337. In some embodiments, the substitutions, insertions, or deletions occur in regions outside the CDRs (e.g., in the FRs). Optionally, the antibody or antigen-binding fragment thereof comprises the VL sequence SEQ ID NO: 337, including one or more post-translational modifications of that sequence. In a particular embodiment, the VL comprises one, two or three CDRs selected from: a. CDR-L1, comprising the amino acid sequence SEQ ID NO: 879, b. CDR-L2, comprising the amino acid sequence SEQ ID NO: 1421, and c. CDR-L3, comprising the amino acid sequence SEQ ID NO: 1963.

[1355] In one aspect, an antibody or antigen-binding fragment thereof is provided, wherein the antibody or antigen-binding fragment thereof comprises a VH as in any of the embodiments provided above, and a VL as in any of the embodiments provided above. In some embodiments, the antibody or antigen-binding fragment thereof comprises the VH amino acid sequence of SEQ ID NO: 66, and the VL amino acid sequence of SEQ ID NO: 337, optionally including post-translational modifications of those sequences.

### TBRE1054

[1356] In one aspect, the present disclosure provides an antibody or antigen-binding fragment thereof comprising at least one or both variable regions selected from: a. VH comprising the amino acid sequence of SEQ ID NO: 67 and b. VL comprising the amino acid sequence of SEQ ID NO: 338.

[1357] In one aspect, the present disclosure provides an antibody or antigen-binding fragment thereof comprising at least one, two, three, four, five, or six CDRs selected from: a. CDR-H1 comprising the amino acid sequence of SEQ ID NO: 609, b. CDR-H2 comprising the amino acid sequence of SEQ ID NO: 1151, c. CDR-H3 comprising the amino acid sequence of SEQ ID NO: 1693, d. CDR-L1 comprising the amino acid sequence of SEQ ID NO: 880, e. CDR-L2 comprising the amino acid sequence of SEQ ID NO: 1422, and f. CDR-L3 comprising the amino acid sequence of SEQ ID NO: 1964.

[1358] In one aspect, the present disclosure provides an antibody or antigen-binding fragment thereof comprising a CDR-H3 comprising the amino acid sequence of SEQ ID NO: 1693, and a CDR-L3 comprising the amino acid sequence of SEQ ID NO: 1964.

[1359] In one aspect, the present disclosure provides an antibody or antigen-binding fragment thereof comprising: a. CDR-H1 comprising the amino acid sequence of SEQ ID NO: 609, b. CDR-H2 comprising the amino acid sequence of SEQ ID NO: 1151, c. CDR-H3 comprising the amino acid sequence of SEQ ID NO: 1693, d. CDR-L1 comprising the amino acid sequence of SEQ ID NO: 880, e. CDR-L2 comprising the amino acid sequence of SEQ ID NO: 1422, and f. CDR-L3 comprising the amino acid sequence of SEQ ID NO: 1964.

[1360] In one aspect, the present disclosure provides an antibody or antigen-binding fragment thereof comprising at least one, at least two, or all three VH CDR sequences selected from: a. CDR-H1 comprising the amino acid sequence of SEQ ID NO: 609, b. CDR-H2 comprising the amino acid sequence of SEQ ID NO: 1151, c. CDR-H3 comprising the amino acid sequence of SEQ ID NO: 1693, and a VL comprising the amino acid sequence of SEQ ID NO: 338.

[1361] In one aspect, the present disclosure provides an antibody or antigen-binding fragment thereof comprising at least one, at least two, or all three VL CDR sequences selected from: a. CDR-L1 comprising the amino acid sequence of SEQ ID NO: 880, b. CDR-L2 comprising the amino acid sequence of SEQ ID NO: 1422, c. CDR-L3 comprising the amino acid sequence of SEQ ID NO: 1964, and a VH comprising the amino acid sequence of SEQ ID NO: 67.

[1362] In one aspect, an antibody or antigen-binding fragment thereof is provided, wherein the antibody or antigen-binding fragment thereof comprises a heavy chain variable domain (VH) having at least 90%, 91%, 92%, 93%, 94%, 95%, 96%, 97%, 98%, 99%, or 100% sequence identity to the amino acid sequence SEQ ID NO: 67. In some embodiments, a VH sequence having at least 90%, 91%, 92%, 93%, 94%, 95%, 96%, 97%, 98%, or 99% identity contains substitutions (e.g., conservative substitutions), insertions, or deletions relative to the reference sequence, but an antibody or antigen-binding fragment thereof comprising that sequence retains the ability to bind to same antigen as of the parent (e.g., cancer associated antigen). In some embodiments, a total of 1 to 10 amino acids have been substituted, inserted and/or deleted in the amino acid sequence SEQ ID NO: 67. In some embodiments, substitutions, insertions, or deletions occur in regions outside the CDRs (e.g., in the FRs). Optionally, the antibody or antigen-binding fragment thereof comprises the VH sequence SEQ ID NO: 67, including one or more post-translational modifications of that sequence. In a particular embodiment, the VH comprises one, two or three CDRs selected from: a. CDR-H1, comprising the amino acid sequence SEQ ID NO: 609, b. CDR-H2, comprising the amino acid sequence SEQ ID NO: 1151, and c. CDR-H3, comprising the amino acid sequence SEQ ID NO: 1693.

[1363] In one aspect, an antibody or antigen-binding fragment thereof is provided, wherein the antibody or antigen-binding fragment thereof comprises a light chain variable domain (VL) having at least 90%, 91%, 92%, 93%, 94%, 95%, 96%, 97%, 98%, 99%, or 100% sequence identity to the amino acid sequence SEQ ID NO: 338. In some embodiments, a VL sequence having at least 90%, 91%, 92%, 93%, 94%, 95%, 96%, 97%, 98%, or 99% identity contains substitutions (e.g., conservative substitutions), insertions, or deletions relative to the reference sequence, but an antibody or antigen-binding fragment thereof comprising that sequence retains the ability to bind to same antigen as the parent (e.g., cancer associated antigen). In some embodiments, a total of 1 to 10 amino acids have been substituted, inserted and/or deleted in the amino acid sequence SEQ ID NO: 338. In some embodiments, the substitutions, insertions, or deletions occur in regions outside the CDRs (e.g., in the FRs). Optionally, the antibody or antigen-binding fragment thereof comprises the VL sequence SEQ ID NO: 338, including one or more post-translational modifications of that sequence. In a particular embodiment, the VL comprises one, two or three CDRs selected from: a. CDR-L1, comprising the amino acid sequence SEQ ID NO: 880, b. CDR-L2, comprising the amino acid sequence SEQ ID NO: 1422, and c. CDR-L3, comprising the amino acid sequence SEQ ID NO: 1964.

[1364] In one aspect, an antibody or antigen-binding fragment thereof is provided, wherein the antibody or antigen-binding fragment thereof comprises a VH as in any of the embodiments provided above, and a VL as in any of the embodiments provided above. In some embodiments, the antibody or antigen-binding fragment thereof comprises the VH amino acid sequence of SEQ ID NO: 67, and the VL amino acid sequence of SEQ ID NO: 338, optionally including post-translational modifications of those sequences.

### TBRE1055

[1365] In one aspect, the present disclosure provides an antibody or antigen-binding fragment thereof comprising at least one or both variable regions selected from: a. VH comprising the amino acid sequence of SEQ ID NO: 68 and b. VL comprising the amino acid sequence of SEQ ID NO: 339.

[1366] In one aspect, the present disclosure provides an antibody or antigen-binding fragment thereof comprising at least one, two, three, four, five, or six CDRs selected from: a. CDR-H1 comprising the amino acid sequence of SEQ ID NO: 610, b. CDR-H2 comprising the amino acid sequence of SEQ ID NO: 1152, c. CDR-H3 comprising the amino acid sequence of SEQ ID NO: 1694, d. CDR-L1 comprising the amino acid sequence of SEQ ID NO: 881, e. CDR-L2 comprising the amino acid sequence of SEQ ID NO: 1423, and f. CDR-L3 comprising the amino acid sequence of SEQ ID NO: 1965.

[1367] In one aspect, the present disclosure provides an antibody or antigen-binding fragment thereof comprising a CDR-H3 comprising the amino acid sequence of SEQ ID NO: 1694, and a CDR-L3 comprising the amino acid sequence of SEQ ID NO: 1965.

[1368] In one aspect, the present disclosure provides an antibody or antigen-binding fragment thereof comprising: a. CDR-H1 comprising the amino acid sequence of SEQ ID NO: 610, b. CDR-H2 comprising the amino acid sequence of SEQ ID NO: 1152, c. CDR-H3 comprising the amino acid sequence of SEQ ID NO: 1694, d. CDR-L1 comprising the amino acid sequence of SEQ ID NO: 881, e. CDR-L2 comprising the amino acid sequence of SEQ ID NO: 1423, and f. CDR-L3 comprising the amino acid sequence of SEQ ID NO: 1965.

[1369] In one aspect, the present disclosure provides an antibody or antigen-binding fragment thereof comprising at least one, at least two, or all three VH CDR sequences selected from: a. CDR-H1 comprising the amino acid sequence of SEQ ID NO: 610, b. CDR-H2 comprising the amino acid sequence of SEQ ID NO: 1152, c. CDR-H3 comprising the amino acid sequence of SEQ ID NO: 1694, and a VL comprising the amino acid sequence of SEQ ID NO: 339.

[1370] In one aspect, the present disclosure provides an antibody or antigen-binding fragment thereof comprising at least one, at least two, or all three VL CDR sequences selected from: a. CDR-L1 comprising the amino acid sequence of SEQ ID NO: 881, b. CDR-L2 comprising the amino acid sequence of SEQ ID NO: 1423, c. CDR-L3 comprising the amino acid sequence of SEQ ID NO: 1965, and a VH comprising the amino acid sequence of SEQ ID NO: 68.

[1371] In one aspect, an antibody or antigen-binding fragment thereof is provided, wherein the antibody or antigen-binding fragment thereof comprises a heavy chain variable domain (VH) having at least 90%, 91%, 92%, 93%, 94%, 95%, 96%, 97%, 98%, 99%, or 100% sequence identity to the amino acid sequence SEQ ID NO: 68. In some embodiments, a VH sequence having at least 90%, 91%, 92%, 93%, 94%, 95%, 96%, 97%, 98%, or 99% identity contains substitutions (e.g., conservative substitutions), insertions, or deletions relative to the reference sequence, but an antibody or antigen-binding fragment thereof comprising that sequence retains the ability to bind to same antigen as of the parent (e.g., cancer associated antigen). In some embodiments, a total of 1 to 10 amino acids have been substituted, inserted and/or deleted in the amino acid sequence SEQ ID NO: 68. In some embodiments, substitutions, insertions, or deletions occur in regions outside the CDRs (e.g., in the FRs). Optionally, the antibody or antigen-binding fragment thereof comprises the VH sequence SEQ ID NO: 68, including one or more post-translational modifications of that sequence. In a particular embodiment, the VH comprises one, two or three CDRs selected from: a. CDR-H1, comprising the amino acid sequence SEQ ID NO: 610, b. CDR-H2, comprising the amino acid sequence SEQ ID NO: 1152, and c. CDR-H3, comprising the amino acid sequence SEQ ID NO: 1694.

[1372] In one aspect, an antibody or antigen-binding fragment thereof is provided, wherein the antibody or antigen-binding fragment thereof comprises a light chain variable domain (VL) having at least 90%, 91%, 92%, 93%, 94%, 95%, 96%, 97%, 98%, 99%, or 100% sequence identity to the amino acid sequence SEQ ID NO: 339. In some embodiments, a VL sequence having at least 90%, 91%, 92%, 93%, 94%, 95%, 96%, 97%, 98%, or 99% identity contains substitutions (e.g., conservative substitutions), insertions, or deletions relative to the reference sequence, but an antibody or antigen-binding fragment thereof comprising that sequence retains the ability to bind to same antigen as the parent (e.g., cancer associated antigen). In some embodiments, a total of 1 to 10 amino acids have been substituted, inserted and/or deleted in the amino acid sequence SEQ ID NO: 339. In some embodiments, the substitutions, insertions, or deletions occur in regions outside the CDRs (e.g., in the FRs). Optionally, the antibody or antigen-binding fragment thereof comprises the VL sequence SEQ ID NO: 339, including one or more post-translational modifications of that sequence. In a particular embodiment, the VL comprises one, two or three CDRs selected from: a. CDR-L1, comprising the amino acid sequence SEQ ID NO: 881, b. CDR-L2, comprising the amino acid sequence SEQ ID NO: 1423, and c. CDR-L3, comprising the amino acid sequence SEQ ID NO: 1965.

[1373] In one aspect, an antibody or antigen-binding fragment thereof is provided, wherein the antibody or antigen-binding fragment thereof comprises a VH as in any of the embodiments provided above, and a VL as in any of the embodiments provided above. In some embodiments, the antibody or antigen-binding fragment thereof comprises the VH amino acid sequence of SEQ ID NO: 68, and the VL amino acid sequence of SEQ ID NO: 339, optionally including post-translational modifications of those sequences.

### TBRE1056

[1374] In one aspect, the present disclosure provides an antibody or antigen-binding fragment thereof comprising at least one or both variable regions selected from: a. VH comprising the amino acid sequence of SEQ ID NO: 69 and b. VL comprising the amino acid sequence of SEQ ID NO: 340.

[1375] In one aspect, the present disclosure provides an antibody or antigen-binding fragment thereof comprising a CDR-H3 comprising the amino acid sequence of SEQ ID NO: 1695 and a CDR-L3 comprising the amino acid sequence of SEQ ID NO: 1966.

[1376] In one aspect, the present disclosure provides an antibody or antigen-binding fragment thereof comprising: a. CDR-H1 comprising the amino acid sequence of SEQ ID NO: 611, b. CDR-H2 comprising the amino acid sequence of SEQ ID NO: 1153, c. CDR-H3 comprising the amino acid sequence of SEQ ID NO: 1695, d. CDR-L1 comprising the amino acid sequence of SEQ ID NO: 882, e. CDR-L2 comprising the amino acid sequence of SEQ ID NO: 1424, and f. CDR-L3 comprising the amino acid sequence of SEQ ID NO: 1966.

[1377] In one aspect, the present disclosure provides an antibody or antigen-binding fragment thereof comprising at least one, two, three, four, five, or six CDRs selected from: a. CDR-H1 comprising the amino acid sequence of SEQ ID NO: 611, b. CDR-H2 comprising the amino acid sequence of SEQ ID NO: 1153, c. CDR-H3 comprising the amino acid sequence of SEQ ID NO: 1695, d. CDR-L1 comprising the amino acid sequence of SEQ ID NO: 882, e. CDR-L2 comprising the amino acid sequence of SEQ ID NO: 1424, and f. CDR-L3 comprising the amino acid sequence of SEQ ID NO: 1966.

[1378] In one aspect, the present disclosure provides an antibody or antigen-binding fragment thereof comprising at least one, at least two, or all three VH CDR sequences selected from: a. CDR-H1 comprising the amino acid sequence of SEQ ID NO: 611, b. CDR-H2 comprising the amino acid sequence of SEQ ID NO: 1153, c. CDR-H3 comprising the amino acid sequence of SEQ ID NO: 1695, and a VL comprising the amino acid sequence of SEQ ID NO: 340.

[1379] In one aspect, the present disclosure provides an antibody or antigen-binding fragment thereof comprising at least one, at least two, or all three VL CDR sequences selected from: a. CDR-L1 comprising the amino acid sequence of SEQ ID NO: 882, b. CDR-L2 comprising the amino acid sequence of SEQ ID NO: 1424, c. CDR-L3 comprising the amino acid sequence of SEQ ID NO: 1966, and a VH comprising the amino acid sequence of SEQ ID NO: 69.

[1380] In one aspect, an antibody or antigen-binding fragment thereof is provided, wherein the antibody or antigen-binding fragment thereof comprises a heavy chain variable domain (VH) having at least 90%, 91%, 92%, 93%, 94%, 95%, 96%, 97%, 98%, 99%, or 100% sequence identity to the amino acid sequence SEQ ID NO: 69. In some embodiments, a VH sequence having at least 90%, 91%, 92%, 93%, 94%, 95%, 96%, 97%, 98%, or 99% identity contains substitutions (e.g., conservative substitutions), insertions, or deletions relative to the reference sequence, but an antibody or antigen-binding fragment thereof comprising that sequence retains the ability to bind to same antigen as of the parent (e.g., cancer associated antigen). In some embodiments, a total of 1 to 10 amino acids have been substituted, inserted and/or deleted in the amino acid sequence SEQ ID NO: 69. In some embodiments, substitutions, insertions, or deletions occur in regions outside the CDRs (e.g., in the FRs). Optionally, the antibody or antigen-binding fragment thereof comprises the VH sequence SEQ ID NO: 69, including one or more post-translational modifications of that sequence. In a particular embodiment, the VH comprises one, two or three CDRs selected from: a. CDR-H1, comprising the amino acid sequence SEQ ID NO: 611, b. CDR-H2, comprising the amino acid sequence SEQ ID NO: 1153, and c. CDR-H3, comprising the amino acid sequence SEQ ID NO: 1695.

[1381] In one aspect, an antibody or antigen-binding fragment thereof is provided, wherein the antibody or antigen-binding fragment thereof comprises a light chain variable domain (VL) having at least 90%, 91%, 92%, 93%, 94%, 95%, 96%, 97%, 98%, 99%, or 100% sequence identity to the amino acid sequence SEQ ID NO: 340. In some embodiments, a VL sequence having at least 90%, 91%, 92%, 93%, 94%, 95%, 96%, 97%, 98%, or 99% identity contains substitutions (e.g., conservative substitutions), insertions, or deletions relative to the reference sequence, but an antibody or antigen-binding fragment thereof comprising that sequence retains the ability to bind to same antigen as the parent (e.g., cancer associated antigen). In some embodiments, a total of 1 to 10 amino acids have been substituted, inserted and/or deleted in the amino acid sequence SEQ ID NO: 340. In some embodiments, the substitutions, insertions, or deletions occur in regions outside the CDRs (e.g., in the FRs). Optionally, the antibody or antigen-binding fragment thereof comprises the VL sequence SEQ ID NO: 340, including one or more post-translational modifications of that sequence. In a particular embodiment, the VL comprises one, two or three CDRs selected from: a. CDR-L1, comprising the amino acid sequence SEQ ID NO: 882, b. CDR-L2, comprising the amino acid sequence SEQ ID NO: 1424, and c. CDR-L3, comprising the amino acid sequence SEQ ID NO: 1966.

[1382] In one aspect, an antibody or antigen-binding fragment thereof is provided, wherein the antibody or antigen-binding fragment thereof comprises a VH as in any of the embodiments provided above, and a VL as in any of the embodiments provided above. In some embodiments, the antibody or antigen-binding fragment thereof comprises the VH amino acid sequence of SEQ ID NO: 69, and the VL amino acid sequence of SEQ ID NO: 340, optionally including post-translational modifications of those sequences.

### TBRE1057

[1383] In one aspect, the present disclosure provides an antibody or antigen-binding fragment thereof comprising at least one or both variable regions selected from: a. VH comprising the amino acid sequence of SEQ ID NO: 70 and b. VL comprising the amino acid sequence of SEQ ID NO: 341.

[1384] In one aspect, the present disclosure provides an antibody or antigen-binding fragment thereof comprising at least one, two, three, four, five, or six CDRs selected from: a. CDR-H1 comprising the amino acid sequence of SEQ ID NO: 612, b. CDR-H2 comprising the amino acid sequence of SEQ ID NO: 1154, c. CDR-H3 comprising the amino acid sequence of SEQ ID NO: 1696, d. CDR-L1 comprising the amino acid sequence of SEQ ID NO: 883, e. CDR-L2 comprising the amino acid sequence of SEQ ID NO: 1425, and f. CDR-L3 comprising the amino acid sequence of SEQ ID NO: 1967.

[1385] In one aspect, the present disclosure provides an antibody or antigen-binding fragment thereof comprising a CDR-H3 comprising the amino acid sequence of SEQ ID NO: 1696, and a CDR-L3 comprising the amino acid sequence of SEQ ID NO: 1967.

[1386] In one aspect, the present disclosure provides an antibody or antigen-binding fragment thereof comprising a CDR-H3 comprising the amino acid sequence of SEQ ID NO: 1696, and a CDR-L3 comprising the amino acid sequence of SEQ ID NO: 1967.

[1387] In one aspect, the present disclosure provides an antibody or antigen-binding fragment thereof comprising at least one, at least two, or all three VH CDR sequences selected from: a. CDR-H1 comprising the amino acid sequence of SEQ ID NO: 612, b. CDR-H2 comprising the amino acid sequence of SEQ ID NO: 1154, c. CDR-H3 comprising the amino acid sequence of SEQ ID NO: 1696, and a VL comprising the amino acid sequence of SEQ ID NO: 341.

[1388] In one aspect, the present disclosure provides an antibody or antigen-binding fragment thereof comprising at least one, at least two, or all three VL CDR sequences selected from: a. CDR-L1 comprising the amino acid sequence of SEQ ID NO: 883, b. CDR-L2 comprising the amino acid sequence of SEQ ID NO: 1425, c. CDR-L3 comprising the amino acid sequence of SEQ ID NO: 1967, and a VH comprising the amino acid sequence of SEQ ID NO: 70.

[1389] In one aspect, an antibody or antigen-binding fragment thereof is provided, wherein the antibody or antigen-binding fragment thereof comprises a heavy chain variable domain (VH) having at least 90%, 91%, 92%, 93%, 94%, 95%, 96%, 97%, 98%, 99%, or 100% sequence identity to the amino acid sequence SEQ ID NO: 70. In some embodiments, a VH sequence having at least 90%, 91%, 92%, 93%, 94%, 95%, 96%, 97%, 98%, or 99% identity contains substitutions (e.g., conservative substitutions), insertions, or deletions relative to the reference sequence, but an antibody or antigen-binding fragment thereof comprising that sequence retains the ability to bind to same antigen as of the parent (e.g., cancer associated antigen). In some embodiments, a total of 1 to 10 amino acids have been substituted, inserted and/or deleted in the amino acid sequence SEQ ID NO: 70. In some embodiments, substitutions, insertions, or deletions occur in regions outside the CDRs (e.g., in the FRs). Optionally, the antibody or antigen-binding fragment thereof comprises the VH sequence SEQ ID NO: 70, including one or more post-translational modifications of that sequence. In a particular embodiment, the VH comprises one, two or three CDRs selected from: a. CDR-H1, comprising the amino acid sequence SEQ ID NO: 612, b. CDR-H2, comprising the amino acid sequence SEQ ID NO: 1154, and c. CDR-H3, comprising the amino acid sequence SEQ ID NO: 1696.

[1390] In one aspect, an antibody or antigen-binding fragment thereof is provided, wherein the antibody or antigen-binding fragment thereof comprises a light chain variable domain (VL) having at least 90%, 91%, 92%, 93%, 94%, 95%, 96%, 97%, 98%, 99%, or 100% sequence identity to the amino acid sequence SEQ ID NO: 341. In some embodiments, a VL sequence having at least 90%, 91%, 92%, 93%, 94%, 95%, 96%, 97%, 98%, or 99% identity contains substitutions (e.g., conservative substitutions), insertions, or deletions relative to the reference sequence, but an antibody or antigen-binding fragment thereof comprising that sequence retains the ability to bind to same antigen as the parent (e.g., cancer associated antigen). In some embodiments, a total of 1 to 10 amino acids have been substituted, inserted and/or deleted in the amino acid sequence SEQ ID NO: 341. In some embodiments, the substitutions, insertions, or deletions occur in regions outside the CDRs (e.g., in the FRs). Optionally, the antibody or antigen-binding fragment thereof comprises the VL sequence SEQ ID NO: 341, including one or more post-translational modifications of that sequence. In a particular embodiment, the VL comprises one, two or three CDRs selected from: a. CDR-L1, comprising the amino acid sequence SEQ ID NO: 883, b. CDR-L2, comprising the amino acid sequence SEQ ID NO: 1425, and c. CDR-L3, comprising the amino acid sequence SEQ ID NO: 1967.

[1391] In one aspect, an antibody or antigen-binding fragment thereof is provided, wherein the antibody or antigen-binding fragment thereof comprises a VH as in any of the embodiments provided above, and a VL as in any of the embodiments provided above. In some embodiments, the antibody or antigen-binding fragment thereof comprises the VH amino acid sequence of SEQ ID NO: 70, and the VL amino acid sequence of SEQ ID NO: 341, optionally including post-translational modifications of those sequences.

### TBRE1058

[1392] In one aspect, the present disclosure provides an antibody or antigen-binding fragment thereof comprising at least one or both variable regions selected from: a. VH comprising the amino acid sequence of SEQ ID NO: 71 and b. VL comprising the amino acid sequence of SEQ ID NO: 342.

[1393] In one aspect, the present disclosure provides an antibody or antigen-binding fragment thereof comprising at least one, two, three, four, five, or six CDRs selected from: a. CDR-H1 comprising the amino acid sequence of SEQ ID NO: 613, b. CDR-H2 comprising the amino acid sequence of SEQ ID NO: 1155, c. CDR-H3 comprising the amino acid sequence of SEQ ID NO: 1697, d. CDR-L1 comprising the amino acid sequence of SEQ ID NO: 884, e. CDR-L2 comprising the amino acid sequence of SEQ ID NO: 1426, and f. CDR-L3 comprising the amino acid sequence of SEQ ID NO: 1968.

[1394] In one aspect, the present disclosure provides an antibody or antigen-binding fragment thereof comprising a CDR-H3 comprising the amino acid sequence of SEQ ID NO: 1697, and a CDR-L3 comprising the amino acid sequence of SEQ ID NO: 1968.

[1395] In one aspect, the present disclosure provides an antibody or antigen-binding fragment thereof comprising: a. CDR-H1 comprising the amino acid sequence of SEQ ID NO: 613, b. CDR-H2 comprising the amino acid sequence of SEQ ID NO: 1155, c. CDR-H3 comprising the amino acid sequence of SEQ ID NO: 1697, d. CDR-L1 comprising the amino acid sequence of SEQ ID NO: 884, e. CDR-L2 comprising the amino acid sequence of SEQ ID NO: 1426, and f. CDR-L3 comprising the amino acid sequence of SEQ ID NO: 1968.

[1396] In one aspect, the present disclosure provides an antibody or antigen-binding fragment thereof comprising at least one, at least two, or all three VH CDR sequences selected from: a. CDR-H1 comprising the amino acid sequence of SEQ ID NO: 613, b. CDR-H2 comprising the amino acid sequence of SEQ ID NO: 1155, c. CDR-H3 comprising the amino acid sequence of SEQ ID NO: 1697, and a VL comprising the amino acid sequence of SEQ ID NO: 342.

[1397] In one aspect, the present disclosure provides an antibody or antigen-binding fragment thereof comprising at least one, at least two, or all three VL CDR sequences selected from: a. CDR-L1 comprising the amino acid sequence of SEQ ID NO: 884, b. CDR-L2 comprising the amino acid sequence of SEQ ID NO: 1426, c. CDR-L3 comprising the amino acid sequence of SEQ ID NO: 1968, and a VH comprising the amino acid sequence of SEQ ID NO: 71.

[1398] In one aspect, an antibody or antigen-binding fragment thereof is provided, wherein the antibody or antigen-binding fragment thereof comprises a heavy chain variable domain (VH) having at least 90%, 91%, 92%, 93%, 94%, 95%, 96%, 97%, 98%, 99%, or 100% sequence identity to the amino acid sequence SEQ ID NO: 71. In some embodiments, a VH sequence having at least 90%, 91%, 92%, 93%, 94%, 95%, 96%, 97%, 98%, or 99% identity contains substitutions (e.g., conservative substitutions), insertions, or deletions relative to the reference sequence, but an antibody or antigen-binding fragment thereof comprising that sequence retains the ability to bind to same antigen as of the parent (e.g., cancer associated antigen). In some embodiments, a total of 1 to 10 amino acids have been substituted, inserted and/or deleted in the amino acid sequence SEQ ID NO: 71. In some embodiments, substitutions, insertions, or deletions occur in regions outside the CDRs (e.g., in the FRs). Optionally, the antibody or antigen-binding fragment thereof comprises the VH sequence SEQ ID NO: 71, including one or more post-translational modifications of that sequence. In a particular embodiment, the VH comprises one, two or three CDRs selected from: a. CDR-H1, comprising the amino acid sequence SEQ ID NO: 613, b. CDR-H2, comprising the amino acid sequence SEQ ID NO: 1155, and c. CDR-H3, comprising the amino acid sequence SEQ ID NO: 1697.

[1399] In one aspect, an antibody or antigen-binding fragment thereof is provided, wherein the antibody or antigen-binding fragment thereof comprises a light chain variable domain (VL) having at least 90%, 91%, 92%, 93%, 94%, 95%, 96%, 97%, 98%, 99%, or 100% sequence identity to the amino acid sequence SEQ ID NO: 342. In some embodiments, a VL sequence having at least 90%, 91%, 92%, 93%, 94%, 95%, 96%, 97%, 98%, or 99% identity contains substitutions (e.g., conservative substitutions), insertions, or deletions relative to the reference sequence, but an antibody or antigen-binding fragment thereof comprising that sequence retains the ability to bind to same antigen as the parent (e.g., cancer associated antigen). In some embodiments, a total of 1 to 10 amino acids have been substituted, inserted and/or deleted in the amino acid sequence SEQ ID NO: 342. In some embodiments, the substitutions, insertions, or deletions occur in regions outside the CDRs (e.g., in the FRs). Optionally, the antibody or antigen-binding fragment thereof comprises the VL sequence SEQ ID NO: 342, including one or more post-translational modifications of that sequence. In a particular embodiment, the VL comprises one, two or three CDRs selected from: a. CDR-L1, comprising the amino acid sequence SEQ ID NO: 884, b. CDR-L2, comprising the amino acid sequence SEQ ID NO: 1426, and c. CDR-L3, comprising the amino acid sequence SEQ ID NO: 1968.

[1400] In one aspect, an antibody or antigen-binding fragment thereof is provided, wherein the antibody or antigen-binding fragment thereof comprises a VH as in any of the embodiments provided above, and a VL as in any of the embodiments provided above. In some embodiments, the antibody or antigen-binding fragment thereof comprises the VH amino acid sequence of SEQ ID NO: 71, and the VL amino acid sequence of SEQ ID NO: 342, optionally including post-translational modifications of those sequences.

### TCER1001

[1401] In one aspect, the present disclosure provides an antibody or antigen-binding fragment thereof comprising at least one or both variable regions selected from: a VH comprising the amino acid sequence of SEQ ID NO: 72 and b. VL comprising the amino acid sequence of SEQ ID NO: 343.

[1402] In one aspect, the present disclosure provides an antibody or antigen-binding fragment thereof comprising at least one, two, three, four, five, or six CDRs selected from: a. CDR-H1 comprising the amino acid sequence of SEQ ID NO: 614, b. CDR-H2 comprising the amino acid sequence of SEQ ID NO: 1156, c. CDR-H3 comprising the amino acid sequence of SEQ ID NO: 1698, d. CDR-L1 comprising the amino acid sequence of SEQ ID NO: 885, e. CDR-L2 comprising the amino acid sequence of SEQ ID NO: 1427, and f. CDR-L3 comprising the amino acid sequence of SEQ ID NO: 1969.

[1403] In one aspect, the present disclosure provides an antibody or antigen-binding fragment thereof comprising a CDR-H3 comprising the amino acid sequence of SEQ ID NO: 1698, and a CDR-L3 comprising the amino acid sequence of SEQ ID NO: 1969.

[1404] In one aspect, the present disclosure provides an antibody or antigen-binding fragment thereof comprising: a. CDR-H1 comprising the amino acid sequence of SEQ ID NO: 614, b. CDR-H2 comprising the amino acid sequence of SEQ ID NO: 1156, c. CDR-H3 comprising the amino acid sequence of SEQ ID NO: 1698, d. CDR-L1 comprising the amino acid sequence of SEQ ID NO: 885, e. CDR-L2 comprising the amino acid sequence of SEQ ID NO: 1427, and f. CDR-L3 comprising the amino acid sequence of SEQ ID NO: 1969.

[1405] In one aspect, the present disclosure provides an antibody or antigen-binding fragment thereof comprising at least one, at least two, or all three VH CDR sequences selected from: a. CDR-H1 comprising the amino acid sequence of SEQ ID NO: 614, b. CDR-H2 comprising the amino acid sequence of SEQ ID NO: 1156, c. CDR-H3 comprising the amino acid sequence of SEQ ID NO: 1698, and a VL comprising the amino acid sequence of SEQ ID NO: 343.

[1406] In one aspect, the present disclosure provides an antibody or antigen-binding fragment thereof comprising at least one, at least two, or all three VL CDR sequences selected from: a. CDR-L1 comprising the amino acid sequence of SEQ ID NO: 885, b. CDR-L2 comprising the amino acid sequence of SEQ ID NO: 1427, c. CDR-L3 comprising the amino acid sequence of SEQ ID NO: 1969, and a VH comprising the amino acid sequence of SEQ ID NO: 72.

[1407] In one aspect, an antibody or antigen-binding fragment thereof is provided, wherein the antibody or antigen-binding fragment thereof comprises a heavy chain variable domain (VH) having at least 90%, 91%, 92%, 93%, 94%, 95%, 96%, 97%, 98%, 99%, or 100% sequence identity to the amino acid sequence SEQ ID NO: 72. In some embodiments, a VH sequence having at least 90%, 91%, 92%, 93%, 94%, 95%, 96%, 97%, 98%, or 99% identity contains substitutions (e.g., conservative substitutions), insertions, or deletions relative to the reference sequence, but an antibody or antigen-binding fragment thereof comprising that sequence retains the ability to bind to same antigen as of the parent (e.g., cancer associated antigen). In some embodiments, a total of 1 to 10 amino acids have been substituted, inserted and/or deleted in the amino acid sequence SEQ ID NO: 72. In some embodiments, substitutions, insertions, or deletions occur in regions outside the CDRs (e.g., in the FRs). Optionally, the antibody or antigen-binding fragment thereof comprises the VH sequence SEQ ID NO: 72, including one or more post-translational modifications of that sequence. In a particular embodiment, the VH comprises one, two or three CDRs selected from: a. CDR-H1, comprising the amino acid sequence SEQ ID NO: 614, b. CDR-H2, comprising the amino acid sequence SEQ ID NO: 1156, and c. CDR-H3, comprising the amino acid sequence SEQ ID NO: 1698.

[1408] In one aspect, an antibody or antigen-binding fragment thereof is provided, wherein the antibody or antigen-binding fragment thereof comprises a light chain variable domain (VL) having at least 90%, 91%, 92%, 93%, 94%, 95%, 96%, 97%, 98%, 99%, or 100% sequence identity to the amino acid sequence SEQ ID NO: 343. In some embodiments, a VL sequence having at least 90%, 91%, 92%, 93%, 94%, 95%, 96%, 97%, 98%, or 99% identity contains substitutions (e.g., conservative substitutions), insertions, or deletions relative to the reference sequence, but an antibody or antigen-binding fragment thereof comprising that sequence retains the ability to bind to same antigen as the parent (e.g., cancer associated antigen). In some embodiments, a total of 1 to 10 amino acids have been substituted, inserted and/or deleted in the amino acid sequence SEQ ID NO: 343. In some embodiments, the substitutions, insertions, or deletions occur in regions outside the CDRs (e.g., in the FRs). Optionally, the antibody or antigen-binding fragment thereof comprises the VL sequence SEQ ID NO: 343, including one or more post-translational modifications of that sequence. In a particular embodiment, the VL comprises one, two or three CDRs selected from: a. CDR-L1, comprising the amino acid sequence SEQ ID NO: 885, b. CDR-L2, comprising the amino acid sequence SEQ ID NO: 1427, and c. CDR-L3, comprising the amino acid sequence SEQ ID NO: 1969.

[1409] In one aspect, an antibody or antigen-binding fragment thereof is provided, wherein the antibody or antigen-binding fragment thereof comprises a VH as in any of the embodiments provided above, and a VL as in any of the embodiments provided above. In some embodiments, the antibody or antigen-binding fragment thereof comprises the VH amino acid sequence of SEQ ID NO: 72, and the VL amino acid sequence of SEQ ID NO: 343, optionally including post-translational modifications of those sequences.

### TCER1002

[1410] In one aspect, the present disclosure provides an antibody or antigen-binding fragment thereof comprising at least one or both variable regions selected from: a. VH comprising the amino acid sequence of SEQ ID NO: 73 and b. VL comprising the amino acid sequence of SEQ ID NO: 344.

[1411] In one aspect, the present disclosure provides an antibody or antigen-binding fragment thereof comprising at least one, two, three, four, five, or six CDRs selected from: a. CDR-H1 comprising the amino acid sequence of SEQ ID NO: 615, b. CDR-H2 comprising the amino acid sequence of SEQ ID NO: 1157, c. CDR-H3 comprising the amino acid sequence of SEQ ID NO: 1699, d. CDR-L1 comprising the amino acid sequence of SEQ ID NO: 886, e. CDR-L2 comprising the amino acid sequence of SEQ ID NO: 1428, and f. CDR-L3 comprising the amino acid sequence of SEQ ID NO: 1970.

[1412] In one aspect, the present disclosure provides an antibody or antigen-binding fragment thereof comprising a CDR-H3 comprising the amino acid sequence of SEQ ID NO: 1699, and a CDR-L3 comprising the amino acid sequence of SEQ ID NO: 1970.

[1413] In one aspect, the present disclosure provides an antibody or antigen-binding fragment thereof comprising: a. CDR-H1 comprising the amino acid sequence of SEQ ID NO: 615, b. CDR-H2 comprising the amino acid sequence of SEQ ID NO: 1157, c. CDR-H3 comprising the amino acid sequence of SEQ ID NO: 1699, d. CDR-L1 comprising the amino acid sequence of SEQ ID NO: 886, e. CDR-L2 comprising the amino acid sequence of SEQ ID NO: 1428, and f. CDR-L3 comprising the amino acid sequence of SEQ ID NO: 1970.

[1414] In one aspect, the present disclosure provides an antibody or antigen-binding fragment thereof comprising at least one, at least two, or all three VH CDR sequences selected from: a. CDR-H1 comprising the amino acid sequence of SEQ ID NO: 615, b. CDR-H2 comprising the amino acid sequence of SEQ ID NO: 1157, c. CDR-H3 comprising the amino acid sequence of SEQ ID NO: 1699, and a VL comprising the amino acid sequence of SEQ ID NO: 344.

[1415] In one aspect, the present disclosure provides an antibody or antigen-binding fragment thereof comprising at least one, at least two, or all three VL CDR sequences selected from: a. CDR-L1 comprising the amino acid sequence of SEQ ID NO: 886, b. CDR-L2 comprising the amino acid sequence of SEQ ID NO: 1428, c. CDR-L3 comprising the amino acid sequence of SEQ ID NO: 1970, and a VH comprising the amino acid sequence of SEQ ID NO: 73.

[1416] In one aspect, an antibody or antigen-binding fragment thereof is provided, wherein the antibody or antigen-binding fragment thereof comprises a heavy chain variable domain (VH) having at least 90%, 91%, 92%, 93%, 94%, 95%, 96%, 97%, 98%, 99%, or 100% sequence identity to the amino acid sequence SEQ ID NO: 73. In some embodiments, a VH sequence having at least 90%, 91%, 92%, 93%, 94%, 95%, 96%, 97%, 98%, or 99% identity contains substitutions (e.g., conservative substitutions), insertions, or deletions relative to the reference sequence, but an antibody or antigen-binding fragment thereof comprising that sequence retains the ability to bind to same antigen as of the parent (e.g., cancer associated antigen). In some embodiments, a total of 1 to 10 amino acids have been substituted, inserted and/or deleted in the amino acid sequence SEQ ID NO: 73. In some embodiments, substitutions, insertions, or deletions occur in regions outside the CDRs (e.g., in the FRs). Optionally, the antibody or antigen-binding fragment thereof comprises the VH sequence SEQ ID NO: 73, including one or more post-translational modifications of that sequence. In a particular embodiment, the VH comprises one, two or three CDRs selected from: a. CDR-H1, comprising the amino acid sequence SEQ ID NO: 615, b. CDR-H2, comprising the amino acid sequence SEQ ID NO: 1157, and c. CDR-H3, comprising the amino acid sequence SEQ ID NO: 1699.

[1417] In one aspect, an antibody or antigen-binding fragment thereof is provided, wherein the antibody or antigen-binding fragment thereof comprises a light chain variable domain (VL) having at least 90%, 91%, 92%, 93%, 94%, 95%, 96%, 97%, 98%, 99%, or 100% sequence identity to the amino acid sequence SEQ ID NO: 344. In some embodiments, a VL sequence having at least 90%, 91%, 92%, 93%, 94%, 95%, 96%, 97%, 98%, or 99% identity contains substitutions (e.g., conservative substitutions), insertions, or deletions relative to the reference sequence, but an antibody or antigen-binding fragment thereof comprising that sequence retains the ability to bind to same antigen as the parent (e.g., cancer associated antigen). In some embodiments, a total of 1 to 10 amino acids have been substituted, inserted and/or deleted in the amino acid sequence SEQ ID NO: 344. In some embodiments, the substitutions, insertions, or deletions occur in regions outside the CDRs (e.g., in the FRs). Optionally, the antibody or antigen-binding fragment thereof comprises the VL sequence SEQ ID NO: 344, including one or more post-translational modifications of that sequence. In a particular embodiment, the VL comprises one, two or three CDRs selected from: a. CDR-L1, comprising the amino acid sequence SEQ ID NO: 886, b. CDR-L2, comprising the amino acid sequence SEQ ID NO: 1428, and c. CDR-L3, comprising the amino acid sequence SEQ ID NO: 1970.

[1418] In one aspect, an antibody or antigen-binding fragment thereof is provided, wherein the antibody or antigen-binding fragment thereof comprises a VH as in any of the embodiments provided above, and a VL as in any of the embodiments provided above. In some embodiments, the antibody or antigen-binding fragment thereof comprises the VH amino acid sequence of SEQ ID NO: 73, and the VL amino acid sequence of SEQ ID NO: 344, optionally including post-translational modifications of those sequences.

### TCER1003

[1419] In one aspect, the present disclosure provides an antibody or antigen-binding fragment thereof comprising at least one or both variable regions selected from: a. VH comprising the amino acid sequence of SEQ ID NO: 74 and b. VL comprising the amino acid sequence of SEQ ID NO: 345.

[1420] In one aspect, the present disclosure provides an antibody or antigen-binding fragment thereof comprising at least one, two, three, four, five, or six CDRs selected from: a. CDR-H1 comprising the amino acid sequence of SEQ ID NO: 616, b. CDR-H2 comprising the amino acid sequence of SEQ ID NO: 1158, c. CDR-H3 comprising the amino acid sequence of SEQ ID NO: 1700, d. CDR-L1 comprising the amino acid sequence of SEQ ID NO: 887, e. CDR-L2 comprising the amino acid sequence of SEQ ID NO: 1429, and f. CDR-L3 comprising the amino acid sequence of SEQ ID NO: 1971.

[1421] In one aspect, the present disclosure provides an antibody or antigen-binding fragment thereof comprising a CDR-H3 comprising the amino acid sequence of SEQ ID NO: 1700, and a CDR-L3 comprising the amino acid sequence of SEQ ID NO: 1971.

[1422] In one aspect, the present disclosure provides an antibody or antigen-binding fragment thereof comprising: a. CDR-H1 comprising the amino acid sequence of SEQ ID NO: 616, b. CDR-H2 comprising the amino acid sequence of SEQ ID NO: 1158, c. CDR-H3 comprising the amino acid sequence of SEQ ID NO: 1700, d. CDR-L1 comprising the amino acid sequence of SEQ ID NO: 887, e. CDR-L2 comprising the amino acid sequence of SEQ ID NO: 1429, and f. CDR-L3 comprising the amino acid sequence of SEQ ID NO: 1971.

[1423] In one aspect, the present disclosure provides an antibody or antigen-binding fragment thereof comprising at least one, at least two, or all three VH CDR sequences selected from: a. CDR-H1 comprising the amino acid sequence of SEQ ID NO: 616, b. CDR-H2 comprising the amino acid sequence of SEQ ID NO: 1158, c. CDR-H3 comprising the amino acid sequence of SEQ ID NO: 1700, and a VL comprising the amino acid sequence of SEQ ID NO: 345.

[1424] In one aspect, the present disclosure provides an antibody or antigen-binding fragment thereof comprising at least one, at least two, or all three VL CDR sequences selected from: a. CDR-L1 comprising the amino acid sequence of SEQ ID NO: 887, b. CDR-L2 comprising the amino acid sequence of SEQ ID NO: 1429, c. CDR-L3 comprising the amino acid sequence of SEQ ID NO: 1971, and a VH comprising the amino acid sequence of SEQ ID NO: 74.

[1425] In one aspect, an antibody or antigen-binding fragment thereof is provided, wherein the antibody or antigen-binding fragment thereof comprises a heavy chain variable domain (VH) having at least 90%, 91%, 92%, 93%, 94%, 95%, 96%, 97%, 98%, 99%, or 100% sequence identity to the amino acid sequence SEQ ID NO: 74. In some embodiments, a VH sequence having at least 90%, 91%, 92%, 93%, 94%, 95%, 96%, 97%, 98%, or 99% identity contains substitutions (e.g., conservative substitutions), insertions, or deletions relative to the reference sequence, but an antibody or antigen-binding fragment thereof comprising that sequence retains the ability to bind to same antigen as of the parent (e.g., cancer associated antigen). In some embodiments, a total of 1 to 10 amino acids have been substituted, inserted and/or deleted in the amino acid sequence SEQ ID NO: 74. In some embodiments, substitutions, insertions, or deletions occur in regions outside the CDRs (e.g., in the FRs). Optionally, the antibody or antigen-binding fragment thereof comprises the VH sequence SEQ ID NO: 74, including one or more post-translational modifications of that sequence. In a particular embodiment, the VH comprises one, two or three CDRs selected from: a. CDR-H1, comprising the amino acid sequence SEQ ID NO: 616, b. CDR-H2, comprising the amino acid sequence SEQ ID NO: 1158, and c. CDR-H3, comprising the amino acid sequence SEQ ID NO: 1700.

[1426] In one aspect, an antibody or antigen-binding fragment thereof is provided, wherein the antibody or antigen-binding fragment thereof comprises a light chain variable domain (VL) having at least 90%, 91%, 92%, 93%, 94%, 95%, 96%, 97%, 98%, 99%, or 100% sequence identity to the amino acid sequence SEQ ID NO: 345. In some embodiments, a VL sequence having at least 90%, 91%, 92%, 93%, 94%, 95%, 96%, 97%, 98%, or 99% identity contains substitutions (e.g., conservative substitutions), insertions, or deletions relative to the reference sequence, but an antibody or antigen-binding fragment thereof comprising that sequence retains the ability to bind to same antigen as the parent (e.g., cancer associated antigen). In some embodiments, a total of 1 to 10 amino acids have been substituted, inserted and/or deleted in the amino acid sequence SEQ ID NO: 345. In some embodiments, the substitutions, insertions, or deletions occur in regions outside the CDRs (e.g., in the FRs). Optionally, the antibody or antigen-binding fragment thereof comprises the VL sequence SEQ ID NO: 345, including one or more post-translational modifications of that sequence. In a particular embodiment, the VL comprises one, two or three CDRs selected from: a. CDR-L1, comprising the amino acid sequence SEQ ID NO: 887, b. CDR-L2, comprising the amino acid sequence SEQ ID NO: 1429, and c. CDR-L3, comprising the amino acid sequence SEQ ID NO: 1971.

[1427] In one aspect, an antibody or antigen-binding fragment thereof is provided, wherein the antibody or antigen-binding fragment thereof comprises a VH as in any of the embodiments provided above, and a VL as in any of the embodiments provided above. In some embodiments, the antibody or antigen-binding fragment thereof comprises the VH amino acid sequence of SEQ ID NO: 74, and the VL amino acid sequence of SEQ ID NO: 345, optionally including post-translational modifications of those sequences.

### TCER1004

[1428] In one aspect, the present disclosure provides an antibody or antigen-binding fragment thereof comprising at least one or both variable regions selected from: a. VH comprising the amino acid sequence of SEQ ID NO: 75 and b. VL comprising the amino acid sequence of SEQ ID NO: 346.

[1429] In one aspect, the present disclosure provides an antibody or antigen-binding fragment thereof comprising at least one, two, three, four, five, or six CDRs selected from: a. CDR-H1 comprising the amino acid sequence of SEQ ID NO: 617, b. CDR-H2 comprising the amino acid sequence of SEQ ID NO: 1159, c. CDR-H3 comprising the amino acid sequence of SEQ ID NO: 1701, d. CDR-L1 comprising the amino acid sequence of SEQ ID NO: 888, e. CDR-L2 comprising the amino acid sequence of SEQ ID NO: 1430, and f. CDR-L3 comprising the amino acid sequence of SEQ ID NO: 1972.

[1430] In one aspect, the present disclosure provides an antibody or antigen-binding fragment thereof comprising a CDR-H3 comprising the amino acid sequence of SEQ ID NO: 1701, and a CDR-L3 comprising the amino acid sequence of SEQ ID NO: 1972.

[1431] In one aspect, the present disclosure provides an antibody or antigen-binding fragment thereof comprising: a. CDR-H1 comprising the amino acid sequence of SEQ ID NO: 617, b. CDR-H2 comprising the amino acid sequence of SEQ ID NO: 1159, c. CDR-H3 comprising the amino acid sequence of SEQ ID NO: 1701, d. CDR-L1 comprising the amino acid sequence of SEQ ID NO: 888, e. CDR-L2 comprising the amino acid sequence of SEQ ID NO: 1430, and f. CDR-L3 comprising the amino acid sequence of SEQ ID NO: 1972.

[1432] In one aspect, the present disclosure provides an antibody or antigen-binding fragment thereof comprising at least one, at least two, or all three VH CDR sequences selected from: a. CDR-H1 comprising the amino acid sequence of SEQ ID NO: 617, b. CDR-H2 comprising the amino acid sequence of SEQ ID NO: 1159, c. CDR-H3 comprising the amino acid sequence of SEQ ID NO: 1701, and a VL comprising the amino acid sequence of SEQ ID NO: 346.

[1433] In one aspect, the present disclosure provides an antibody or antigen-binding fragment thereof comprising at least one, at least two, or all three VL CDR sequences selected from: a. CDR-L1 comprising the amino acid sequence of SEQ ID NO: 888, b. CDR-L2 comprising the amino acid sequence of SEQ ID NO: 1430, c. CDR-L3 comprising the amino acid sequence of SEQ ID NO: 1972, and a VH comprising the amino acid sequence of SEQ ID NO: 75.

[1434] In one aspect, an antibody or antigen-binding fragment thereof is provided, wherein the antibody or antigen-binding fragment thereof comprises a heavy chain variable domain (VH) having at least 90%, 91%, 92%, 93%, 94%, 95%, 96%, 97%, 98%, 99%, or 100% sequence identity to the amino acid sequence SEQ ID NO: 75. In some embodiments, a VH sequence having at least 90%, 91%, 92%, 93%, 94%, 95%, 96%, 97%, 98%, or 99% identity contains substitutions (e.g., conservative substitutions), insertions, or deletions relative to the reference sequence, but an antibody or antigen-binding fragment thereof comprising that sequence retains the ability to bind to same antigen as of the parent (e.g., cancer associated antigen). In some embodiments, a total of 1 to 10 amino acids have been substituted, inserted and/or deleted in the amino acid sequence SEQ ID NO: 75. In some embodiments, substitutions, insertions, or deletions occur in regions outside the CDRs (e.g., in the FRs). Optionally, the antibody or antigen-binding fragment thereof comprises the VH sequence SEQ ID NO: 75, including one or more post-translational modifications of that sequence. In a particular embodiment, the VH comprises one, two or three CDRs selected from: a. CDR-H1, comprising the amino acid sequence SEQ ID NO: 617, b. CDR-H2, comprising the amino acid sequence SEQ ID NO: 1159, and c. CDR-H3, comprising the amino acid sequence SEQ ID NO: 1701.

[1435] In one aspect, an antibody or antigen-binding fragment thereof is provided, wherein the antibody or antigen-binding fragment thereof comprises a light chain variable domain (VL) having at least 90%, 91%, 92%, 93%, 94%, 95%, 96%, 97%, 98%, 99%, or 100% sequence identity to the amino acid sequence SEQ ID NO: 346. In some embodiments, a VL sequence having at least 90%, 91%, 92%, 93%, 94%, 95%, 96%, 97%, 98%, or 99% identity contains substitutions (e.g., conservative substitutions), insertions, or deletions relative to the reference sequence, but an antibody or antigen-binding fragment thereof comprising that sequence retains the ability to bind to same antigen as the parent (e.g., cancer associated antigen). In some embodiments, a total of 1 to 10 amino acids have been substituted, inserted and/or deleted in the amino acid sequence SEQ ID NO: 346. In some embodiments, the substitutions, insertions, or deletions occur in regions outside the CDRs (e.g., in the FRs). Optionally, the antibody or antigen-binding fragment thereof comprises the VL sequence SEQ ID NO: 346, including one or more post-translational modifications of that sequence. In a particular embodiment, the VL comprises one, two or three CDRs selected from: a CDR-L1, comprising the amino acid sequence SEQ ID NO: 888, b. CDR-L2, comprising the amino acid sequence SEQ ID NO: 1430, and c. CDR-L3, comprising the amino acid sequence SEQ ID NO: 1972.

[1436] In one aspect, an antibody or antigen-binding fragment thereof is provided, wherein the antibody or antigen-binding fragment thereof comprises a VH as in any of the embodiments provided above, and a VL as in any of the embodiments provided above. In some embodiments, the antibody or antigen-binding fragment thereof comprises the VH amino acid sequence of SEQ ID NO: 75, and the VL amino acid sequence of SEQ ID NO: 346, optionally including post-translational modifications of those sequences.

### TCER1005

[1437] In one aspect, the present disclosure provides an antibody or antigen-binding fragment thereof comprising at least one or both variable regions selected from: a. VH comprising the amino acid sequence of SEQ ID NO: 76 and b. VL comprising the amino acid sequence of SEQ ID NO: 347.

[1438] In one aspect, the present disclosure provides an antibody or antigen-binding fragment thereof comprising at least one, two, three, four, five, or six CDRs selected from: a. CDR-H1 comprising the amino acid sequence of SEQ ID NO: 618, b. CDR-H2 comprising the amino acid sequence of SEQ ID NO: 1160, c. CDR-H3 comprising the amino acid sequence of SEQ ID NO: 1702, d. CDR-L1 comprising the amino acid sequence of SEQ ID NO: 889, e. CDR-L2 comprising the amino acid sequence of SEQ ID NO: 1431, f. CDR-L3 comprising the amino acid sequence of SEQ ID NO: 1973.

[1439] In one aspect, the present disclosure provides an antibody or antigen-binding fragment thereof comprising a CDR-H3 comprising the amino acid sequence of SEQ ID NO: 1702, and a CDR-L3 comprising the amino acid sequence of SEQ ID NO: 1973.

[1440] In one aspect, the present disclosure provides an antibody or antigen-binding fragment thereof comprising: a. CDR-H1 comprising the amino acid sequence of SEQ ID NO: 618, b. CDR-H2 comprising the amino acid sequence of SEQ ID NO: 1160, c. CDR-H3 comprising the amino acid sequence of SEQ ID NO: 1702, d. CDR-L1 comprising the amino acid sequence of SEQ ID NO: 889, e. CDR-L2 comprising the amino acid sequence of SEQ ID NO: 1431, f. CDR-L3 comprising the amino acid sequence of SEQ ID NO: 1973.

[1441] In one aspect, the present disclosure provides an antibody or antigen-binding fragment thereof comprising at least one, at least two, or all three VH CDR sequences selected from: a. CDR-H1 comprising the amino acid sequence of SEQ ID NO: 618, b. CDR-H2 comprising the amino acid sequence of SEQ ID NO: 1160, c. CDR-H3 comprising the amino acid sequence of SEQ ID NO: 1702, and a VL comprising the amino acid sequence of SEQ ID NO: 347.

[1442] In one aspect, the present disclosure provides an antibody or antigen-binding fragment thereof comprising at least one, at least two, or all three VL CDR sequences selected from: a. CDR-L1 comprising the amino acid sequence of SEQ ID NO: 889, b. CDR-L2 comprising the amino acid sequence of SEQ ID NO: 1431, c. CDR-L3 comprising the amino acid sequence of SEQ ID NO: 1973, and a VH comprising the amino acid sequence of SEQ ID NO: 76.

[1443] In one aspect, an antibody or antigen-binding fragment thereof is provided, wherein the antibody or antigen-binding fragment thereof comprises a heavy chain variable domain (VH) having at least 90%, 91%, 92%, 93%, 94%, 95%, 96%, 97%, 98%, 99%, or 100% sequence identity to the amino acid sequence SEQ ID NO: 76. In some embodiments, a VH sequence having at least 90%, 91%, 92%, 93%, 94%, 95%, 96%, 97%, 98%, or 99% identity contains substitutions (e.g., conservative substitutions), insertions, or deletions relative to the reference sequence, but an antibody or antigen-binding fragment thereof comprising that sequence retains the ability to bind to same antigen as of the parent (e.g., cancer associated antigen). In some embodiments, a total of 1 to 10 amino acids have been substituted, inserted and/or deleted in the amino acid sequence SEQ ID NO: 76. In some embodiments, substitutions, insertions, or deletions occur in regions outside the CDRs (e.g., in the FRs). Optionally, the antibody or antigen-binding fragment thereof comprises the VH sequence SEQ ID NO: 76, including one or more post-translational modifications of that sequence. In a particular embodiment, the VH comprises one, two or three CDRs selected from: a. CDR-H1, comprising the amino acid sequence SEQ ID NO: 618, b. CDR-H2, comprising the amino acid sequence SEQ ID NO: 1160, and c. CDR-H3, comprising the amino acid sequence SEQ ID NO: 1702.

[1444] In one aspect, an antibody or antigen-binding fragment thereof is provided, wherein the antibody or antigen-binding fragment thereof comprises a light chain variable domain (VL) having at least 90%, 91%, 92%, 93%, 94%, 95%, 96%, 97%, 98%, 99%, or 100% sequence identity to the amino acid sequence SEQ ID NO: 347. In some embodiments, a VL sequence having at least 90%, 91%, 92%, 93%, 94%, 95%, 96%, 97%, 98%, or 99% identity contains substitutions (e.g., conservative substitutions), insertions, or deletions relative to the reference sequence, but an antibody or antigen-binding fragment thereof comprising that sequence retains the ability to bind to same antigen as the parent (e.g., cancer associated antigen). In some embodiments, a total of 1 to 10 amino acids have been substituted, inserted and/or deleted in the amino acid sequence SEQ ID NO: 347. In some embodiments, the substitutions, insertions, or deletions occur in regions outside the CDRs (e.g., in the FRs). Optionally, the antibody or antigen-binding fragment thereof comprises the VL sequence SEQ ID NO: 347, including one or more post-translational modifications of that sequence. In a particular embodiment, the VL comprises one, two or three CDRs selected from: a. CDR-L1, comprising the amino acid sequence SEQ ID NO: 889, b. CDR-L2, comprising the amino acid sequence SEQ ID NO: 1431, and c. CDR-L3, comprising the amino acid sequence SEQ ID NO: 1973.

[1445] In one aspect, an antibody or antigen-binding fragment thereof is provided, wherein the antibody or antigen-binding fragment thereof comprises a VH as in any of the embodiments provided above, and a VL as in any of the embodiments provided above. In some embodiments, the antibody or antigen-binding fragment thereof comprises the VH amino acid sequence of SEQ ID NO: 76, and the VL amino acid sequence of SEQ ID NO: 347, optionally including post-translational modifications of those sequences.

### TCER1006

[1446] In one aspect, the present disclosure provides an antibody or antigen-binding fragment thereof comprising at least one or both variable regions selected from: a. VH comprising the amino acid sequence of SEQ ID NO: 77 and b. VL comprising the amino acid sequence of SEQ ID NO: 348.

[1447] In one aspect, the present disclosure provides an antibody or antigen-binding fragment thereof comprising at least one, two, three, four, five, or six CDRs selected from: a. CDR-H1 comprising the amino acid sequence of SEQ ID NO: 619, b. CDR-H2 comprising the amino acid sequence of SEQ ID NO: 1161, c. CDR-H3 comprising the amino acid sequence of SEQ ID NO: 1703, d. CDR-L1 comprising the amino acid sequence of SEQ ID NO: 890, e. CDR-L2 comprising the amino acid sequence of SEQ ID NO: 1432, and f. CDR-L3 comprising the amino acid sequence of SEQ ID NO: 1974.

[1448] In one aspect, the present disclosure provides an antibody or antigen-binding fragment thereof comprising a CDR-H3 comprising the amino acid sequence of SEQ ID NO: 1703, and a CDR-L3 comprising the amino acid sequence of SEQ ID NO: 1974.

[1449] In one aspect, the present disclosure provides an antibody or antigen-binding fragment thereof comprising: a. CDR-H1 comprising the amino acid sequence of SEQ ID NO: 619, b. CDR-H2 comprising the amino acid sequence of SEQ ID NO: 1161, c. CDR-H3 comprising the amino acid sequence of SEQ ID NO: 1703, d. CDR-L1 comprising the amino acid sequence of SEQ ID NO: 890, e. CDR-L2 comprising the amino acid sequence of SEQ ID NO: 1432, and f. CDR-L3 comprising the amino acid sequence of SEQ ID NO: 1974.

[1450] In one aspect, the present disclosure provides an antibody or antigen-binding fragment thereof comprising at least one, at least two, or all three VH CDR sequences selected from: a. CDR-H1 comprising the amino acid sequence of SEQ ID NO: 619, b. CDR-H2 comprising the amino acid sequence of SEQ ID NO: 1161, c. CDR-H3 comprising the amino acid sequence of SEQ ID NO: 1703, and a VL comprising the amino acid sequence of SEQ ID NO: 348.

[1451] In one aspect, the present disclosure provides an antibody or antigen-binding fragment thereof comprising at least one, at least two, or all three VL CDR sequences selected from: a. CDR-L1 comprising the amino acid sequence of SEQ ID NO: 890, b. CDR-L2 comprising the amino acid sequence of SEQ ID NO: 1432, c. CDR-L3 comprising the amino acid sequence of SEQ ID NO: 1974, and a VH comprising the amino acid sequence of SEQ ID NO: 77.

[1452] In one aspect, an antibody or antigen-binding fragment thereof is provided, wherein the antibody or antigen-binding fragment thereof comprises a heavy chain variable domain (VH) having at least 90%, 91%, 92%, 93%, 94%, 95%, 96%, 97%, 98%, 99%, or 100% sequence identity to the amino acid sequence SEQ ID NO: 77. In some embodiments, a VH sequence having at least 90%, 91%, 92%, 93%, 94%, 95%, 96%, 97%, 98%, or 99% identity contains substitutions (e.g., conservative substitutions), insertions, or deletions relative to the reference sequence, but an antibody or antigen-binding fragment thereof comprising that sequence retains the ability to bind to same antigen as of the parent (e.g., cancer associated antigen). In some embodiments, a total of 1 to 10 amino acids have been substituted, inserted and/or deleted in the amino acid sequence SEQ ID NO: 77. In some embodiments, substitutions, insertions, or deletions occur in regions outside the CDRs (e.g., in the FRs). Optionally, the antibody or antigen-binding fragment thereof comprises the VH sequence SEQ ID NO: 77, including one or more post-translational modifications of that sequence. In a particular embodiment, the VH comprises one, two or three CDRs selected from: a. CDR-H1, comprising the amino acid sequence SEQ ID NO: 619, b. CDR-H2, comprising the amino acid sequence SEQ ID NO: 1161, and c. CDR-H3, comprising the amino acid sequence SEQ ID NO: 1703.

[1453] In one aspect, an antibody or antigen-binding fragment thereof is provided, wherein the antibody or antigen-binding fragment thereof comprises a light chain variable domain (VL) having at least 90%, 91%, 92%, 93%, 94%, 95%, 96%, 97%, 98%, 99%, or 100% sequence identity to the amino acid sequence SEQ ID NO: 348. In some embodiments, a VL sequence having at least 90%, 91%, 92%, 93%, 94%, 95%, 96%, 97%, 98%, or 99% identity contains substitutions (e.g., conservative substitutions), insertions, or deletions relative to the reference sequence, but an antibody or antigen-binding fragment thereof comprising that sequence retains the ability to bind to same antigen as the parent (e.g., cancer associated antigen). In some embodiments, a total of 1 to 10 amino acids have been substituted, inserted and/or deleted in the amino acid sequence SEQ ID NO: 348. In some embodiments, the substitutions, insertions, or deletions occur in regions outside the CDRs (e.g., in the FRs). Optionally, the antibody or antigen-binding fragment thereof comprises the VL sequence SEQ ID NO: 348, including one or more post-translational modifications of that sequence. In a particular embodiment, the VL comprises one, two or three CDRs selected from: a. CDR-L1, comprising the amino acid sequence SEQ ID NO: 890, b. CDR-L2, comprising the amino acid sequence SEQ ID NO: 1432, and c. CDR-L3, comprising the amino acid sequence SEQ ID NO: 1974.

[1454] In one aspect, an antibody or antigen-binding fragment thereof is provided, wherein the antibody or antigen-binding fragment thereof comprises a VH as in any of the embodiments provided above, and a VL as in any of the embodiments provided above. In some embodiments, the antibody or antigen-binding fragment thereof comprises the VH amino acid sequence of SEQ ID NO: 77, and the VL amino acid sequence of SEQ ID NO: 348, optionally including post-translational modifications of those sequences.

### TCER1007

[1455] In one aspect, the present disclosure provides an antibody or antigen-binding fragment thereof comprising at least one or both variable regions selected from: a. VH comprising the amino acid sequence of SEQ ID NO: 78 and b. VL comprising the amino acid sequence of SEQ ID NO: 349.

[1456] In one aspect, the present disclosure provides an antibody or antigen-binding fragment thereof comprising at least one, two, three, four, five, or six CDRs selected from: a. CDR-H1 comprising the amino acid sequence of SEQ ID NO: 620, b. CDR-H2 comprising the amino acid sequence of SEQ ID NO: 1162, c. CDR-H3 comprising the amino acid sequence of SEQ ID NO: 1704, d. CDR-L1 comprising the amino acid sequence of SEQ ID NO: 891, e. CDR-L2 comprising the amino acid sequence of SEQ ID NO: 1433, and f. CDR-L3 comprising the amino acid sequence of SEQ ID NO: 1975.

[1457] In one aspect, the present disclosure provides an antibody or antigen-binding fragment thereof comprising a CDR-H3 comprising the amino acid sequence of SEQ ID NO: 1704, and a CDR-L3 comprising the amino acid sequence of SEQ ID NO: 1975.

[1458] In one aspect, the present disclosure provides an antibody or antigen-binding fragment thereof comprising: a. CDR-H1 comprising the amino acid sequence of SEQ ID NO: 620, b. CDR-H2 comprising the amino acid sequence of SEQ ID NO: 1162, c. CDR-H3 comprising the amino acid sequence of SEQ ID NO: 1704, d. CDR-L1 comprising the amino acid sequence of SEQ ID NO: 891, e. CDR-L2 comprising the amino acid sequence of SEQ ID NO: 1433, and f. CDR-L3 comprising the amino acid sequence of SEQ ID NO: 1975.

[1459] In one aspect, the present disclosure provides an antibody or antigen-binding fragment thereof comprising at least one, at least two, or all three VH CDR sequences selected from: a. CDR-H1 comprising the amino acid sequence of SEQ ID NO: 620, b. CDR-H2 comprising the amino acid sequence of SEQ ID NO: 1162, c. CDR-H3 comprising the amino acid sequence of SEQ ID NO: 1704, and a VL comprising the amino acid sequence of SEQ ID NO: 349.

[1460] In one aspect, the present disclosure provides an antibody or antigen-binding fragment thereof comprising at least one, at least two, or all three VL CDR sequences selected from: a. CDR-L1 comprising the amino acid sequence of SEQ ID NO: 891, b. CDR-L2 comprising the amino acid sequence of SEQ ID NO: 1433, c. CDR-L3 comprising the amino acid sequence of SEQ ID NO: 1975, and a VH comprising the amino acid sequence of SEQ ID NO: 78.

[1461] In one aspect, an antibody or antigen-binding fragment thereof is provided, wherein the antibody or antigen-binding fragment thereof comprises a heavy chain variable domain (VH) having at least 90%, 91%, 92%, 93%, 94%, 95%, 96%, 97%, 98%, 99%, or 100% sequence identity to the amino acid sequence SEQ ID NO: 78. In some embodiments, a VH sequence having at least 90%, 91%, 92%, 93%, 94%, 95%, 96%, 97%, 98%, or 99% identity contains substitutions (e.g., conservative substitutions), insertions, or deletions relative to the reference sequence, but an antibody or antigen-binding fragment thereof comprising that sequence retains the ability to bind to same antigen as of the parent (e.g., cancer associated antigen). In some embodiments, a total of 1 to 10 amino acids have been substituted, inserted and/or deleted in the amino acid sequence SEQ ID NO: 78. In some embodiments, substitutions, insertions, or deletions occur in regions outside the CDRs (e.g., in the FRs). Optionally, the antibody or antigen-binding fragment thereof comprises the VH sequence SEQ ID NO: 78, including one or more post-translational modifications of that sequence. In a particular embodiment, the VH comprises one, two or three CDRs selected from: a. CDR-H1, comprising the amino acid sequence SEQ ID NO: 620, b. CDR-H2, comprising the amino acid sequence SEQ ID NO: 1162, and c. CDR-H3, comprising the amino acid sequence SEQ ID NO: 1704.

[1462] In one aspect, an antibody or antigen-binding fragment thereof is provided, wherein the antibody or antigen-binding fragment thereof comprises a light chain variable domain (VL) having at least 90%, 91%, 92%, 93%, 94%, 95%, 96%, 97%, 98%, 99%, or 100% sequence identity to the amino acid sequence SEQ ID NO: 349. In some embodiments, a VL sequence having at least 90%, 91%, 92%, 93%, 94%, 95%, 96%, 97%, 98%, or 99% identity contains substitutions (e.g., conservative substitutions), insertions, or deletions relative to the reference sequence, but an antibody or antigen-binding fragment thereof comprising that sequence retains the ability to bind to same antigen as the parent (e.g., cancer associated antigen). In some embodiments, a total of 1 to 10 amino acids have been substituted, inserted and/or deleted in the amino acid sequence SEQ ID NO: 349. In some embodiments, the substitutions, insertions, or deletions occur in regions outside the CDRs (e.g., in the FRs). Optionally, the antibody or antigen-binding fragment thereof comprises the VL sequence SEQ ID NO: 349, including one or more post-translational modifications of that sequence. In a particular embodiment, the VL comprises one, two or three CDRs selected from: a. CDR-L1, comprising the amino acid sequence SEQ ID NO: 891, b. CDR-L2, comprising the amino acid sequence SEQ ID NO: 1433, and c. CDR-L3, comprising the amino acid sequence SEQ ID NO: 1975.

[1463] In one aspect, an antibody or antigen-binding fragment thereof is provided, wherein the antibody or antigen-binding fragment thereof comprises a VH as in any of the embodiments provided above, and a VL as in any of the embodiments provided above. In some embodiments, the antibody or antigen-binding fragment thereof comprises the VH amino acid sequence of SEQ ID NO: 78, and the VL amino acid sequence of SEQ ID NO: 349, optionally including post-translational modifications of those sequences.

### TCHO1001

[1464] In one aspect, the present disclosure provides an antibody or antigen-binding fragment thereof comprising at least one or both variable regions selected from: a. VH comprising the amino acid sequence of SEQ ID NO: 79 and b. VL comprising the amino acid sequence of SEQ ID NO: 350.

[1465] In one aspect, the present disclosure provides an antibody or antigen-binding fragment thereof comprising at least one, two, three, four, five, or six CDRs selected from: a. CDR-H1 comprising the amino acid sequence of SEQ ID NO: 621, b. CDR-H2 comprising the amino acid sequence of SEQ ID NO: 1163, c. CDR-H3 comprising the amino acid sequence of SEQ ID NO: 1705, d. CDR-L1 comprising the amino acid sequence of SEQ ID NO: 892, e. CDR-L2 comprising the amino acid sequence of SEQ ID NO: 1434, and f. CDR-L3 comprising the amino acid sequence of SEQ ID NO: 1976.

[1466] In one aspect, the present disclosure provides an antibody or antigen-binding fragment thereof comprising a CDR-H3 comprising the amino acid sequence of SEQ ID NO: 1705, and a CDR-L3 comprising the amino acid sequence of SEQ ID NO: 1976.

[1467] In one aspect, the present disclosure provides an antibody or antigen-binding fragment thereof comprising: a. CDR-H1 comprising the amino acid sequence of SEQ ID NO: 621, b. CDR-H2 comprising the amino acid sequence of SEQ ID NO: 1163, c. CDR-H3 comprising the amino acid sequence of SEQ ID NO: 1705, d. CDR-L1 comprising the amino acid sequence of SEQ ID NO: 892, e. CDR-L2 comprising the amino acid sequence of SEQ ID NO: 1434, and f. CDR-L3 comprising the amino acid sequence of SEQ ID NO: 1976.

[1468] In one aspect, the present disclosure provides an antibody or antigen-binding fragment thereof comprising at least one, at least two, or all three VH CDR sequences selected from: a. CDR-H1 comprising the amino acid sequence of SEQ ID NO: 621, b. CDR-H2 comprising the amino acid sequence of SEQ ID NO: 1163, c. CDR-H3 comprising the amino acid sequence of SEQ ID NO: 1705, and a VL comprising the amino acid sequence of SEQ ID NO: 350.

[1469] In one aspect, the present disclosure provides an antibody or antigen-binding fragment thereof comprising at least one, at least two, or all three VL CDR sequences selected from: a. CDR-L1 comprising the amino acid sequence of SEQ ID NO: 892, b. CDR-L2 comprising the amino acid sequence of SEQ ID NO: 1434, c. CDR-L3 comprising the amino acid sequence of SEQ ID NO: 1976, and a VH comprising the amino acid sequence of SEQ ID NO: 79.

[1470] In one aspect, an antibody or antigen-binding fragment thereof is provided, wherein the antibody or antigen-binding fragment thereof comprises a heavy chain variable domain (VH) having at least 90%, 91%, 92%, 93%, 94%, 95%, 96%, 97%, 98%, 99%, or 100% sequence identity to the amino acid sequence SEQ ID NO: 79. In some embodiments, a VH sequence having at least 90%, 91%, 92%, 93%, 94%, 95%, 96%, 97%, 98%, or 99% identity contains substitutions (e.g., conservative substitutions), insertions, or deletions relative to the reference sequence, but an antibody or antigen-binding fragment thereof comprising that sequence retains the ability to bind to same antigen as of the parent (e.g., cancer associated antigen). In some embodiments, a total of 1 to 10 amino acids have been substituted, inserted and/or deleted in the amino acid sequence SEQ ID NO: 79. In some embodiments, substitutions, insertions, or deletions occur in regions outside the CDRs (e.g., in the FRs). Optionally, the antibody or antigen-binding fragment thereof comprises the VH sequence SEQ ID NO: 79, including one or more post-translational modifications of that sequence. In a particular embodiment, the VH comprises one, two or three CDRs selected from: a. CDR-H1, comprising the amino acid sequence SEQ ID NO: 621, b. CDR-H2, comprising the amino acid sequence SEQ ID NO: 1163, and c. CDR-H3, comprising the amino acid sequence SEQ ID NO: 1705.

[1471] In one aspect, an antibody or antigen-binding fragment thereof is provided, wherein the antibody or antigen-binding fragment thereof comprises a light chain variable domain (VL) having at least 90%, 91%, 92%, 93%, 94%, 95%, 96%, 97%, 98%, 99%, or 100% sequence identity to the amino acid sequence SEQ ID NO: 350. In some embodiments, a VL sequence having at least 90%, 91%, 92%, 93%, 94%, 95%, 96%, 97%, 98%, or 99% identity contains substitutions (e.g., conservative substitutions), insertions, or deletions relative to the reference sequence, but an antibody or antigen-binding fragment thereof comprising that sequence retains the ability to bind to same antigen as the parent (e.g., cancer associated antigen). In some embodiments, a total of 1 to 10 amino acids have been substituted, inserted and/or deleted in the amino acid sequence SEQ ID NO: 350. In some embodiments, the substitutions, insertions, or deletions occur in regions outside the CDRs (e.g., in the FRs). Optionally, the antibody or antigen-binding fragment thereof comprises the VL sequence SEQ ID NO: 350, including one or more post-translational modifications of that sequence. In a particular embodiment, the VL comprises one, two or three CDRs selected from: a. CDR-L1, comprising the amino acid sequence SEQ ID NO: 892, b. CDR-L2, comprising the amino acid sequence SEQ ID NO: 1434, and c. CDR-L3, comprising the amino acid sequence SEQ ID NO: 1976.

[1472] In one aspect, an antibody or antigen-binding fragment thereof is provided, wherein the antibody or antigen-binding fragment thereof comprises a VH as in any of the embodiments provided above, and a VL as in any of the embodiments provided above. In some embodiments, the antibody or antigen-binding fragment thereof comprises the VH amino acid sequence of SEQ ID NO: 79, and the VL amino acid sequence of SEQ ID NO: 350, optionally including post-translational modifications of those sequences. TCOL1001

[1473] In one aspect, the present disclosure provides an antibody or antigen-binding fragment thereof comprising at least one or both variable regions selected from: a. VH comprising the amino acid sequence of SEQ ID NO: 80 and b. VL comprising the amino acid sequence of SEQ ID NO: 351.

[1474] In one aspect, the present disclosure provides an antibody or antigen-binding fragment thereof comprising at least one, two, three, four, five, or six CDRs selected from: a. CDR-H1 comprising the amino acid sequence of SEQ ID NO: 622, b. CDR-H2 comprising the amino acid sequence of SEQ ID NO: 1164, c. CDR-H3 comprising the amino acid sequence of SEQ ID NO: 1706, d. CDR-L1 comprising the amino acid sequence of SEQ ID NO: 893, e. CDR-L2 comprising the amino acid sequence of SEQ ID NO: 1435, and f. CDR-L3 comprising the amino acid sequence of SEQ ID NO: 1977. In one aspect, the present disclosure provides an antibody or antigen-binding fragment thereof comprising a CDR-H3 comprising the amino acid sequence of SEQ ID NO: 1706, and a CDR-L3 comprising the amino acid sequence of SEQ ID NO: 1977.

[1475] In one aspect, the present disclosure provides an antibody or antigen-binding fragment thereof comprising at least one, at least two, or all three VH CDR sequences selected from: a. CDR-H1 comprising the amino acid sequence of SEQ ID NO: 622, b. CDR-H2 comprising the amino acid sequence of SEQ ID NO: 1164, c. CDR-H3 comprising the amino acid sequence of SEQ ID NO: 1706, and a VL comprising the amino acid sequence of SEQ ID NO: 351.

[1476] In one aspect, the present disclosure provides an antibody or antigen-binding fragment thereof comprising at least one, at least two, or all three VL CDR sequences selected from: a. CDR-L1 comprising the amino acid sequence of SEQ ID NO: 893, b. CDR-L2 comprising the amino acid sequence of SEQ ID NO: 1435, c. CDR-L3 comprising the amino acid sequence of SEQ ID NO: 1977, and a VH comprising the amino acid sequence of SEQ ID NO: 80.

[1477] In one aspect, an antibody or antigen-binding fragment thereof is provided, wherein the antibody or antigen-binding fragment thereof comprises a heavy chain variable domain (VH) having at least 90%, 91%, 92%, 93%, 94%, 95%, 96%, 97%, 98%, 99%, or 100% sequence identity to the amino acid sequence SEQ ID NO: 80. In some embodiments, a VH sequence having at least 90%, 91%, 92%, 93%, 94%, 95%, 96%, 97%, 98%, or 99% identity contains substitutions (e.g., conservative substitutions), insertions, or deletions relative to the reference sequence, but an antibody or antigen-binding fragment thereof comprising that sequence retains the ability to bind to same antigen as of the parent (e.g., cancer associated antigen). In some embodiments, a total of 1 to 10 amino acids have been substituted, inserted and/or deleted in the amino acid sequence SEQ ID NO: 80. In some embodiments, substitutions, insertions, or deletions occur in regions outside the CDRs (e.g., in the FRs). Optionally, the antibody or antigen-binding fragment thereof comprises the VH sequence SEQ ID NO: 80, including one or more post-translational modifications of that sequence. In a particular embodiment, the VH comprises one, two or three CDRs selected from: a CDR-H1, comprising the amino acid sequence SEQ ID NO: 622, b. CDR-H2, comprising the amino acid sequence SEQ ID NO: 1164, and c. CDR-H3, comprising the amino acid sequence SEQ ID NO: 1706.

[1478] In one aspect, an antibody or antigen-binding fragment thereof is provided, wherein the antibody or antigen-binding fragment thereof comprises a light chain variable domain (VL) having at least 90%, 91%, 92%, 93%, 94%, 95%, 96%, 97%, 98%, 99%, or 100% sequence identity to the amino acid sequence SEQ ID NO: 351. In some embodiments, a VL sequence having at least 90%, 91%, 92%, 93%, 94%, 95%, 96%, 97%, 98%, or 99% identity contains substitutions (e.g., conservative substitutions), insertions, or deletions relative to the reference sequence, but an antibody or antigen-binding fragment thereof comprising that sequence retains the ability to bind to same antigen as the parent (e.g., cancer associated antigen). In some embodiments, a total of 1 to 10 amino acids have been substituted, inserted and/or deleted in the amino acid sequence SEQ ID NO: 351. In some embodiments, the substitutions, insertions, or deletions occur in regions outside the CDRs (e.g., in the FRs). Optionally, the antibody or antigen-binding fragment thereof comprises the VL sequence SEQ ID NO: 351, including one or more post-translational modifications of that sequence. In a particular embodiment, the VL comprises one, two or three CDRs selected from: a. CDR-L1, comprising the amino acid sequence SEQ ID NO: 893, b. CDR-L2, comprising the amino acid sequence SEQ ID NO: 1435, and c. CDR-L3, comprising the amino acid sequence SEQ ID NO: 1977.

[1479] In one aspect, an antibody or antigen-binding fragment thereof is provided, wherein the antibody or antigen-binding fragment thereof comprises a VH as in any of the embodiments provided above, and a VL as in any of the embodiments provided above. In some embodiments, the antibody or antigen-binding fragment thereof comprises the VH amino acid sequence of SEQ ID NO: 80, and the VL amino acid sequence of SEQ ID NO: 351, optionally including post-translational modifications of those sequences. TCOL1002

[1480] In one aspect, the present disclosure provides an antibody or antigen-binding fragment thereof comprising at least one or both variable regions selected from: a. VH comprising the amino acid sequence of SEQ ID NO: 81 and b. VL comprising the amino acid sequence of SEQ ID NO: 352.

[1481] In one aspect, the present disclosure provides an antibody or antigen-binding fragment thereof comprising at least one, two, three, four, five, or six CDRs selected from: a. CDR-H1 comprising the amino acid sequence of SEQ ID NO: 623, b. CDR-H2 comprising the amino acid sequence of SEQ ID NO: 1165, c. CDR-H3 comprising the amino acid sequence of SEQ ID NO: 1707, d. CDR-L1 comprising the amino acid sequence of SEQ ID NO: 894, e. CDR-L2 comprising the amino acid sequence of SEQ ID NO: 1436, and f. CDR-L3 comprising the amino acid sequence of SEQ ID NO: 1978.

[1482] In one aspect, the present disclosure provides an antibody or antigen-binding fragment thereof comprising a CDR-H3 comprising the amino acid sequence of SEQ ID NO: 1707, and a CDR-L3 comprising the amino acid sequence of SEQ ID NO: 1978.

[1483] In one aspect, the present disclosure provides an antibody or antigen-binding fragment thereof comprising at least one, at least two, or all three VH CDR sequences selected from: a. CDR-H1 comprising the amino acid sequence of SEQ ID NO: 623, b. CDR-H2 comprising the amino acid sequence of SEQ ID NO: 1165, c. CDR-H3 comprising the amino acid sequence of SEQ ID NO: 1707, and a VL comprising the amino acid sequence of SEQ ID NO: 352.

[1484] In one aspect, the present disclosure provides an antibody or antigen-binding fragment thereof comprising at least one, at least two, or all three VL CDR sequences selected from: a. CDR-L1 comprising the amino acid sequence of SEQ ID NO: 894, b. CDR-L2 comprising the amino acid sequence of SEQ ID NO: 1436, c. CDR-L3 comprising the amino acid sequence of SEQ ID NO: 1978, and a VH comprising the amino acid sequence of SEQ ID NO: 81.

[1485] In one aspect, an antibody or antigen-binding fragment thereof is provided, wherein the antibody or antigen-binding fragment thereof comprises a heavy chain variable domain (VH) having at least 90%, 91%, 92%, 93%, 94%, 95%, 96%, 97%, 98%, 99%, or 100% sequence identity to the amino acid sequence SEQ ID NO: 81. In some embodiments, a VH sequence having at least 90%, 91%, 92%, 93%, 94%, 95%, 96%, 97%, 98%, or 99% identity contains substitutions (e.g., conservative substitutions), insertions, or deletions relative to the reference sequence, but an antibody or antigen-binding fragment thereof comprising that sequence retains the ability to bind to same antigen as of the parent (e.g., cancer associated antigen). In some embodiments, a total of 1 to 10 amino acids have been substituted, inserted and/or deleted in the amino acid sequence SEQ ID NO: 81. In some embodiments, substitutions, insertions, or deletions occur in regions outside the CDRs (e.g., in the FRs). Optionally, the antibody or antigen-binding fragment thereof comprises the VH sequence SEQ ID NO: 81, including one or more post-translational modifications of that sequence. In a particular embodiment, the VH comprises one, two or three CDRs selected from: a. CDR-H1, comprising the amino acid sequence SEQ ID NO: 623, b. CDR-H2, comprising the amino acid sequence SEQ ID NO: 1165, and c. CDR-H3, comprising the amino acid sequence SEQ ID NO: 1707.

[1486] In one aspect, an antibody or antigen-binding fragment thereof is provided, wherein the antibody or antigen-binding fragment thereof comprises a light chain variable domain (VL) having at least 90%, 91%, 92%, 93%, 94%, 95%, 96%, 97%, 98%, 99%, or 100% sequence identity to the amino acid sequence SEQ ID NO: 352. In some embodiments, a VL sequence having at least 90%, 91%, 92%, 93%, 94%, 95%, 96%, 97%, 98%, or 99% identity contains substitutions (e.g., conservative substitutions), insertions, or deletions relative to the reference sequence, but an antibody or antigen-binding fragment thereof comprising that sequence retains the ability to bind to same antigen as the parent (e.g., cancer associated antigen). In some embodiments, a total of 1 to 10 amino acids have been substituted, inserted and/or deleted in the amino acid sequence SEQ ID NO: 352. In some embodiments, the substitutions, insertions, or deletions occur in regions outside the CDRs (e.g., in the FRs). Optionally, the antibody or antigen-binding fragment thereof comprises the VL sequence SEQ ID NO: 352, including one or more post-translational modifications of that sequence. In a particular embodiment, the VL comprises one, two or three CDRs selected from: a. CDR-L1, comprising the amino acid sequence SEQ ID NO: 894, b. CDR-L2, comprising the amino acid sequence SEQ ID NO: 1436, and c. CDR-L3, comprising the amino acid sequence SEQ ID NO: 1978.

[1487] In one aspect, an antibody or antigen-binding fragment thereof is provided, wherein the antibody or antigen-binding fragment thereof comprises a VH as in any of the embodiments provided above, and a VL as in any of the embodiments provided above. In some embodiments, the antibody or antigen-binding fragment thereof comprises the VH amino acid sequence of SEQ ID NO: 81, and the VL amino acid sequence of SEQ ID NO: 352, optionally including post-translational modifications of those sequences.

### TCOL1003

[1488] In one aspect, the present disclosure provides an antibody or antigen-binding fragment thereof comprising at least one or both variable regions selected from: a. VH comprising the amino acid sequence of SEQ ID NO: 82 and b. VL comprising the amino acid sequence of SEQ ID NO: 353.

[1489] In one aspect, the present disclosure provides an antibody or antigen-binding fragment thereof comprising at least one, two, three, four, five, or six CDRs selected from: a. CDR-H1 comprising the amino acid sequence of SEQ ID NO: 624, b. CDR-H2 comprising the amino acid sequence of SEQ ID NO: 1166, c. CDR-H3 comprising the amino acid sequence of SEQ ID NO: 1708, d. CDR-L1 comprising the amino acid sequence of SEQ ID NO: 895, e. CDR-L2 comprising the amino acid sequence of SEQ ID NO: 1437, and f. CDR-L3 comprising the amino acid sequence of SEQ ID NO: 1979. In one aspect, the present disclosure provides an antibody or antigen-binding fragment thereof comprising a CDR-H3 comprising the amino acid sequence of SEQ ID NO: 1708, and a CDR-L3 comprising the amino acid sequence of SEQ ID NO: 1979.

[1490] In one aspect, the present disclosure provides an antibody or antigen-binding fragment thereof comprising at least one, at least two, or all three VH CDR sequences selected from: a. CDR-H1 comprising the amino acid sequence of SEQ ID NO: 624, b. CDR-H2 comprising the amino acid sequence of SEQ ID NO: 1166, c. CDR-H3 comprising the amino acid sequence of SEQ ID NO: 1708, and a VL comprising the amino acid sequence of SEQ ID NO: 353.

[1491] In one aspect, the present disclosure provides an antibody or antigen-binding fragment thereof comprising at least one, at least two, or all three VL CDR sequences selected from: a. CDR-L1 comprising the amino acid sequence of SEQ ID NO: 895, b. CDR-L2 comprising the amino acid sequence of SEQ ID NO: 1437, c. CDR-L3 comprising the amino acid sequence of SEQ ID NO: 1979, and a VH comprising the amino acid sequence of SEQ ID NO: 82.

[1492] In one aspect, an antibody or antigen-binding fragment thereof is provided, wherein the antibody or antigen-binding fragment thereof comprises a heavy chain variable domain (VH) having at least 90%, 91%, 92%, 93%, 94%, 95%, 96%, 97%, 98%, 99%, or 100% sequence identity to the amino acid sequence SEQ ID NO: 82. In some embodiments, a VH sequence having at least 90%, 91%, 92%, 93%, 94%, 95%, 96%, 97%, 98%, or 99% identity contains substitutions (e.g., conservative substitutions), insertions, or deletions relative to the reference sequence, but an antibody or antigen-binding fragment thereof comprising that sequence retains the ability to bind to same antigen as of the parent (e.g., cancer associated antigen). In some embodiments, a total of 1 to 10 amino acids have been substituted, inserted and/or deleted in the amino acid sequence SEQ ID NO: 82. In some embodiments, substitutions, insertions, or deletions occur in regions outside the CDRs (e.g., in the FRs). Optionally, the antibody or antigen-binding fragment thereof comprises the VH sequence SEQ ID NO: 82, including one or more post-translational modifications of that sequence. In a particular embodiment, the VH comprises one, two or three CDRs selected from: a. CDR-H1, comprising the amino acid sequence SEQ ID NO: 624, b. CDR-H2, comprising the amino acid sequence SEQ ID NO: 1166, and c. CDR-H3, comprising the amino acid sequence SEQ ID NO: 1708.

[1493] In one aspect, an antibody or antigen-binding fragment thereof is provided, wherein the antibody or antigen-binding fragment thereof comprises a light chain variable domain (VL) having at least 90%, 91%, 92%, 93%, 94%, 95%, 96%, 97%, 98%, 99%, or 100% sequence identity to the amino acid sequence SEQ ID NO: 353. In some embodiments, a VL sequence having at least 90%, 91%, 92%, 93%, 94%, 95%, 96%, 97%, 98%, or 99% identity contains substitutions (e.g., conservative substitutions), insertions, or deletions relative to the reference sequence, but an antibody or antigen-binding fragment thereof comprising that sequence retains the ability to bind to same antigen as the parent (e.g., cancer associated antigen). In some embodiments, a total of 1 to 10 amino acids have been substituted, inserted and/or deleted in the amino acid sequence SEQ ID NO: 353. In some embodiments, the substitutions, insertions, or deletions occur in regions outside the CDRs (e.g., in the FRs). Optionally, the antibody or antigen-binding fragment thereof comprises the VL sequence SEQ ID NO: 353, including one or more post-translational modifications of that sequence. In a particular embodiment, the VL comprises one, two or three CDRs selected from: a. CDR-L1, comprising the amino acid sequence SEQ ID NO: 895, b. CDR-L2, comprising the amino acid sequence SEQ ID NO: 1437, and c. CDR-L3, comprising the amino acid sequence SEQ ID NO: 1979.

[1494] In one aspect, an antibody or antigen-binding fragment thereof is provided, wherein the antibody or antigen-binding fragment thereof comprises a VH as in any of the embodiments provided above, and a VL as in any of the embodiments provided above. In some embodiments, the antibody or antigen-binding fragment thereof comprises the VH amino acid sequence of SEQ ID NO: 82, and the VL amino acid sequence of SEQ ID NO: 353, optionally including post-translational modifications of those sequences.

### TCOL1004

[1495] In one aspect, the present disclosure provides an antibody or antigen-binding fragment thereof comprising at least one or both variable regions selected from: a. VH comprising the amino acid sequence of SEQ ID NO: 83 and b. VL comprising the amino acid sequence of SEQ ID NO: 354.

[1496] In one aspect, the present disclosure provides an antibody or antigen-binding fragment thereof comprising at least one, two, three, four, five, or six CDRs selected from: a. CDR-H1 comprising the amino acid sequence of SEQ ID NO: 625, b. CDR-H2 comprising the amino acid sequence of SEQ ID NO: 1167, c. CDR-H3 comprising the amino acid sequence of SEQ ID NO: 1709, d. CDR-L1 comprising the amino acid sequence of SEQ ID NO: 896, e. CDR-L2 comprising the amino acid sequence of SEQ ID NO: 1438, and f. CDR-L3 comprising the amino acid sequence of SEQ ID NO: 1980. In one aspect, the present disclosure provides an antibody or antigen-binding fragment thereof comprising a CDR-H3 comprising the amino acid sequence of SEQ ID NO: 1709, and a CDR-L3 comprising the amino acid sequence of SEQ ID NO: 1980.

[1497] In one aspect, the present disclosure provides an antibody or antigen-binding fragment thereof comprising at least one, at least two, or all three VH CDR sequences selected from: a. CDR-H1 comprising the amino acid sequence of SEQ ID NO: 625, b. CDR-H2 comprising the amino acid sequence of SEQ ID NO: 1167, c. CDR-H3 comprising the amino acid sequence of SEQ ID NO: 1709, and a VL comprising the amino acid sequence of SEQ ID NO: 354.

[1498] In one aspect, the present disclosure provides an antibody or antigen-binding fragment thereof comprising at least one, at least two, or all three VL CDR sequences selected from: a. CDR-L1 comprising the amino acid sequence of SEQ ID NO: 896, b. CDR-L2 comprising the amino acid sequence of SEQ ID NO: 1438, c. CDR-L3 comprising the amino acid sequence of SEQ ID NO: 1980, and a VH comprising the amino acid sequence of SEQ ID NO: 83.

[1499] In one aspect, an antibody or antigen-binding fragment thereof is provided, wherein the antibody or antigen-binding fragment thereof comprises a heavy chain variable domain (VH) having at least 90%, 91%, 92%, 93%, 94%, 95%, 96%, 97%, 98%, 99%, or 100% sequence identity to the amino acid sequence SEQ ID NO: 83. In some embodiments, a VH sequence having at least 90%, 91%, 92%, 93%, 94%, 95%, 96%, 97%, 98%, or 99% identity contains substitutions (e.g., conservative substitutions), thereof comprising that sequence retains the ability to bind to same antigen as of the parent (e.g., cancer associated antigen). In some embodiments, a total of 1 to 10 amino acids have been substituted, inserted and/or deleted in the amino acid sequence SEQ ID NO: 83. In some embodiments, substitutions, insertions, or deletions occur in regions outside the CDRs (e.g., in the FRs). Optionally, the antibody or antigen-binding fragment thereof comprises the VH sequence SEQ ID NO: 83, including one or more post-translational modifications of that sequence. In a particular embodiment, the VH comprises one, two or three CDRs selected from: a. CDR-H1, comprising the amino acid sequence SEQ ID NO: 625, b. CDR-H2, comprising the amino acid sequence SEQ ID NO: 1167, and c. CDR-H3, comprising the amino acid sequence SEQ ID NO: 1709.

[1500] In one aspect, an antibody or antigen-binding fragment thereof is provided, wherein the antibody or antigen-binding fragment thereof comprises a light chain variable domain (VL) having at least 90%, 91%, 92%, 93%, 94%, 95%, 96%, 97%, 98%, 99%, or 100% sequence identity to the amino acid sequence SEQ ID NO: 354. In some embodiments, a VL sequence having at least 90%, 91%, 92%, 93%, 94%, 95%, 96%, 97%, 98%, or 99% identity contains substitutions (e.g., conservative substitutions), insertions, or deletions relative to the reference sequence, but an antibody or antigen-binding fragment thereof comprising that sequence retains the ability to bind to same antigen as the parent (e.g., cancer associated antigen). In some embodiments, a total of 1 to 10 amino acids have been substituted, inserted and/or deleted in the amino acid sequence SEQ ID NO: 354. In some embodiments, the substitutions, insertions, or deletions occur in regions outside the CDRs (e.g., in the FRs). Optionally, the antibody or antigen-binding fragment thereof comprises the VL sequence SEQ ID NO: 354, including one or more post-translational modifications of that sequence. In a particular embodiment, the VL comprises one, two or three CDRs selected from: a. CDR-L1, comprising the amino acid sequence SEQ ID NO: 896, b. CDR-L2, comprising the amino acid sequence SEQ ID NO: 1438, and c. CDR-L3, comprising the amino acid sequence SEQ ID NO: 1980.

[1501] In one aspect, an antibody or antigen-binding fragment thereof is provided, wherein the antibody or antigen-binding fragment thereof comprises a VH as in any of the embodiments provided above, and a VL as in any of the embodiments provided above. In some embodiments, the antibody or antigen-binding fragment thereof comprises the VH amino acid sequence of SEQ ID NO: 83, and the VL amino acid sequence of SEQ ID NO: 354, optionally including post-translational modifications of those sequences.

### TCOL1005

[1502] In one aspect, the present disclosure provides an antibody or antigen-binding fragment thereof comprising at least one or both variable regions selected from: a. VH comprising the amino acid sequence of SEQ ID NO: 84 and b. VL comprising the amino acid sequence of SEQ ID NO: 355.

[1503] In one aspect, the present disclosure provides an antibody or antigen-binding fragment thereof comprising at least one, two, three, four, five, or six CDRs selected from: a. CDR-H1 comprising the amino acid sequence of SEQ ID NO: 626, b. CDR-H2 comprising the amino acid sequence of SEQ ID NO: 1168, c. CDR-H3 comprising the amino acid sequence of SEQ ID NO: 1710, d. CDR-L1 comprising the amino acid sequence of SEQ ID NO: 897, e. CDR-L2 comprising the amino acid sequence of SEQ ID NO: 1439, and f. CDR-L3 comprising the amino acid sequence of SEQ ID NO: 1981. In one aspect, the present disclosure provides an antibody or antigen-binding fragment thereof comprising a CDR-H3 comprising the amino acid sequence of SEQ ID NO: 1710, and a CDR-L3 comprising the amino acid sequence of SEQ ID NO: 1981.

[1504] In one aspect, the present disclosure provides an antibody or antigen-binding fragment thereof comprising at least one, at least two, or all three VH CDR sequences selected from: a. CDR-H1 comprising the amino acid sequence of SEQ ID NO: 626, b. CDR-H2 comprising the amino acid sequence of SEQ ID NO: 1168, c. CDR-H3 comprising the amino acid sequence of SEQ ID NO: 1710, and a VL comprising the amino acid sequence of SEQ ID NO: 355.

[1505] In one aspect, the present disclosure provides an antibody or antigen-binding fragment thereof comprising at least one, at least two, or all three VL CDR sequences selected from: a. CDR-L1 comprising the amino acid sequence of SEQ ID NO: 897, b. CDR-L2 comprising the amino acid sequence of SEQ ID NO: 1439, c. CDR-L3 comprising the amino acid sequence of SEQ ID NO: 1981, and a VH comprising the amino acid sequence of SEQ ID NO: 84.

[1506] In one aspect, an antibody or antigen-binding fragment thereof is provided, wherein the antibody or antigen-binding fragment thereof comprises a heavy chain variable domain (VH) having at least 90%, 91%, 92%, 93%, 94%, 95%, 96%, 97%, 98%, 99%, or 100% sequence identity to the amino acid sequence SEQ ID NO: 84. In some embodiments, a VH sequence having at least 90%, 91%, 92%, 93%, 94%, 95%, 96%, 97%, 98%, or 99% identity contains substitutions (e.g., conservative substitutions), insertions, or deletions relative to the reference sequence, but an antibody or antigen-binding fragment thereof comprising that sequence retains the ability to bind to same antigen as of the parent (e.g., cancer associated antigen). In some embodiments, a total of 1 to 10 amino acids have been substituted, inserted and/or deleted in the amino acid sequence SEQ ID NO: 84. In some embodiments, substitutions, insertions, or deletions occur in regions outside the CDRs (e.g., in the FRs). Optionally, the antibody or antigen-binding fragment thereof comprises the VH sequence SEQ ID NO: 84, including one or more post-translational modifications of that sequence. In a particular embodiment, the VH comprises one, two or three CDRs selected from: a. CDR-H1, comprising the amino acid sequence SEQ ID NO: 626, b. CDR-H2, comprising the amino acid sequence SEQ ID NO: 1168, and c. CDR-H3, comprising the amino acid sequence SEQ ID NO: 1710.

[1507] In one aspect, an antibody or antigen-binding fragment thereof is provided, wherein the antibody or antigen-binding fragment thereof comprises a light chain variable domain (VL) having at least 90%, 91%, 92%, 93%, 94%, 95%, 96%, 97%, 98%, 99%, or 100% sequence identity to the amino acid sequence SEQ ID NO: 355. In some embodiments, a VL sequence having at least 90%, 91%, 92%, 93%, 94%, 95%, 96%, 97%, 98%, or 99% identity contains substitutions (e.g., conservative substitutions), insertions, or deletions relative to the reference sequence, but an antibody or antigen-binding fragment thereof comprising that sequence retains the ability to bind to same antigen as the parent (e.g., cancer associated antigen). In some embodiments, a total of 1 to 10 amino acids have been substituted, inserted and/or deleted in the amino acid sequence SEQ ID NO: 355. In some embodiments, the substitutions, insertions, or deletions occur in regions outside the CDRs (e.g., in the FRs). Optionally, the antibody or antigen-binding fragment thereof comprises the VL sequence SEQ ID NO: 355, including one or more post-translational modifications of that sequence. In a particular embodiment, the VL comprises one, two or three CDRs selected from: a. CDR-L1, comprising the amino acid sequence SEQ ID NO: 897, b. CDR-L2, comprising the amino acid sequence SEQ ID NO: 1439, and c. CDR-L3, comprising the amino acid sequence SEQ ID NO: 1981.

[1508] In one aspect, an antibody or antigen-binding fragment thereof is provided, wherein the antibody or antigen-binding fragment thereof comprises a VH as in any of the embodiments provided above, and a VL as in any of the embodiments provided above. In some embodiments, the antibody or antigen-binding fragment thereof comprises the VH amino acid sequence of SEQ ID NO: 84, and the VL amino acid sequence of SEQ ID NO: 355, optionally including post-translational modifications of those sequences.

### TCOL1006

[1509] In one aspect, the present disclosure provides an antibody or antigen-binding fragment thereof comprising at least one or both variable regions selected from: a. VH comprising the amino acid sequence of SEQ ID NO: 85 and b. VL comprising the amino acid sequence of SEQ ID NO: 356.

[1510] In one aspect, the present disclosure provides an antibody or antigen-binding fragment thereof comprising at least one, two, three, four, five, or six CDRs selected from: a. CDR-H1 comprising the amino acid sequence of SEQ ID NO: 627, b. CDR-H2 comprising the amino acid sequence of SEQ ID NO: 1169, c. CDR-H3 comprising the amino acid sequence of SEQ ID NO: 1711, d. CDR-L1 comprising the amino acid sequence of SEQ ID NO: 898, e. CDR-L2 comprising the amino acid sequence of SEQ ID NO: 1440, and f. CDR-L3 comprising the amino acid sequence of SEQ ID NO: 1982.

[1511] In one aspect, the present disclosure provides an antibody or antigen-binding fragment thereof comprising a CDR-H3 comprising the amino acid sequence of SEQ ID NO: 1711, and a CDR-L3 comprising the amino acid sequence of SEQ ID NO: 1982.

[1512] In one aspect, the present disclosure provides an antibody or antigen-binding fragment thereof comprising at least one, at least two, or all three VH CDR sequences selected from: a. CDR-H1 comprising the amino acid sequence of SEQ ID NO: 627, b. CDR-H2 comprising the amino acid sequence of SEQ ID NO: 1169, c. CDR-H3 comprising the amino acid sequence of SEQ ID NO: 1711, and a VL comprising the amino acid sequence of SEQ ID NO: 356.

[1513] In one aspect, the present disclosure provides an antibody or antigen-binding fragment thereof comprising at least one, at least two, or all three VL CDR sequences selected from: a. CDR-L1 comprising the amino acid sequence of SEQ ID NO: 898, b. CDR-L2 comprising the amino acid sequence of SEQ ID NO: 1440, c. CDR-L3 comprising the amino acid sequence of SEQ ID NO: 1982, and a VH comprising the amino acid sequence of SEQ ID NO: 85.

[1514] In one aspect, an antibody or antigen-binding fragment thereof is provided, wherein the antibody or antigen-binding fragment thereof comprises a heavy chain variable domain (VH) having at least 90%, 91%, 92%, 93%, 94%, 95%, 96%, 97%, 98%, 99%, or 100% sequence identity to the amino acid sequence SEQ ID NO: 85. In some embodiments, a VH sequence having at least 90%, 91%, 92%, 93%, 94%, 95%, 96%, 97%, 98%, or 99% identity contains substitutions (e.g., conservative substitutions), insertions, or deletions relative to the reference sequence, but an antibody or antigen-binding fragment thereof comprising that sequence retains the ability to bind to same antigen as of the parent (e.g., cancer associated antigen). In some embodiments, a total of 1 to 10 amino acids have been substituted, inserted and/or deleted in the amino acid sequence SEQ ID NO: 85. In some embodiments, substitutions, insertions, or deletions occur in regions outside the CDRs (e.g., in the FRs). Optionally, the antibody or antigen-binding fragment thereof comprises the VH sequence SEQ ID NO: 85, including one or more post-translational modifications of that sequence. In a particular embodiment, the VH comprises one, two or three CDRs selected from: a. CDR-H1, comprising the amino acid sequence SEQ ID NO: 627, b. CDR-H2, comprising the amino acid sequence SEQ ID NO: 1169, and c. CDR-H3, comprising the amino acid sequence SEQ ID NO: 1711.

[1515] In one aspect, an antibody or antigen-binding fragment thereof is provided, wherein the antibody or antigen-binding fragment thereof comprises a light chain variable domain (VL) having at least 90%, 91%, 92%, 93%, 94%, 95%, 96%, 97%, 98%, 99%, or 100% sequence identity to the amino acid sequence SEQ ID NO: 356. In some embodiments, a VL sequence having at least 90%, 91%, 92%, 93%, 94%, 95%, 96%, 97%, 98%, or 99% identity contains substitutions (e.g., conservative substitutions), insertions, or deletions relative to the reference sequence, but an antibody or antigen-binding fragment thereof comprising that sequence retains the ability to bind to same antigen as the parent (e.g., cancer associated antigen). In some embodiments, a total of 1 to 10 amino acids have been substituted, inserted and/or deleted in the amino acid sequence SEQ ID NO: 356. In some embodiments, the substitutions, insertions, or deletions occur in regions outside the CDRs (e.g., in the FRs). Optionally, the antibody or antigen-binding fragment thereof comprises the VL sequence SEQ ID NO: 356, including one or more post-translational modifications of that sequence. In a particular embodiment, the VL comprises one, two or three CDRs selected from: a. CDR-L1, comprising the amino acid sequence SEQ ID NO: 898, b. CDR-L2, comprising the amino acid sequence SEQ ID NO: 1440, and c. CDR-L3, comprising the amino acid sequence SEQ ID NO: 1982.

[1516] In one aspect, an antibody or antigen-binding fragment thereof is provided, wherein the antibody or antigen-binding fragment thereof comprises a VH as in any of the embodiments provided above, and a VL as in any of the embodiments provided above. In some embodiments, the antibody or antigen-binding fragment thereof comprises the VH amino acid sequence of SEQ ID NO: 85, and the VL amino acid sequence of SEQ ID NO: 356, optionally including post-translational modifications of those sequences.

### TCOL1007

[1517] In one aspect, the present disclosure provides an antibody or antigen-binding fragment thereof comprising at least one or both variable regions selected from: a. VH comprising the amino acid sequence of SEQ ID NO: 86 and b. VL comprising the amino acid sequence of SEQ ID NO: 357.

[1518] In one aspect, the present disclosure provides an antibody or antigen-binding fragment thereof comprising at least one, two, three, four, five, or six CDRs selected from: a. CDR-H1 comprising the amino acid sequence of SEQ ID NO: 628, b. CDR-H2 comprising the amino acid sequence of SEQ ID NO: 1170, c. CDR-H3 comprising the amino acid sequence of SEQ ID NO: 1712, d. CDR-L1 comprising the amino acid sequence of SEQ ID NO: 899, e. CDR-L2 comprising the amino acid sequence of SEQ ID NO: 1441, and f. CDR-L3 comprising the amino acid sequence of SEQ ID NO: 1983.

[1519] In one aspect, the present disclosure provides an antibody or antigen-binding fragment thereof comprising a CDR-H3 comprising the amino acid sequence of SEQ ID NO: 1712, and a CDR-L3 comprising the amino acid sequence of SEQ ID NO: 1983.

[1520] In one aspect, the present disclosure provides an antibody or antigen-binding fragment thereof comprising at least one, at least two, or all three VH CDR sequences selected from: a. CDR-H1 comprising the amino acid sequence of SEQ ID NO: 628, b. CDR-H2 comprising the amino acid sequence of SEQ ID NO: 1170, c. CDR-H3 comprising the amino acid sequence of SEQ ID NO: 1712, and a VL comprising the amino acid sequence of SEQ ID NO: 357.

[1521] In one aspect, the present disclosure provides an antibody or antigen-binding fragment thereof comprising at least one, at least two, or all three VL CDR sequences selected from: a. CDR-L1 comprising the amino acid sequence of SEQ ID NO: 899, b. CDR-L2 comprising the amino acid sequence of SEQ ID NO: 1441, c. CDR-L3 comprising the amino acid sequence of SEQ ID NO: 1983, and a VH comprising the amino acid sequence of SEQ ID NO: 86.

[1522] In one aspect, an antibody or antigen-binding fragment thereof is provided, wherein the antibody or antigen-binding fragment thereof comprises a heavy chain variable domain (VH) having at least 90%, 91%, 92%, 93%, 94%, 95%, 96%, 97%, 98%, 99%, or 100% sequence identity to the amino acid sequence SEQ ID NO: 86. In some embodiments, a VH sequence having at least 90%, 91%, 92%, 93%, 94%, 95%, 96%, 97%, 98%, or 99% identity contains substitutions (e.g., conservative substitutions), insertions, or deletions relative to the reference sequence, but an antibody or antigen-binding fragment thereof comprising that sequence retains the ability to bind to same antigen as of the parent (e.g., cancer associated antigen). In some embodiments, a total of 1 to 10 amino acids have been substituted, inserted and/or deleted in the amino acid sequence SEQ ID NO: 86. In some embodiments, substitutions, insertions, or deletions occur in regions outside the CDRs (e.g., in the FRs). Optionally, the antibody or antigen-binding fragment thereof comprises the VH sequence SEQ ID NO: 86, including one or more post-translational modifications of that sequence. In a particular embodiment, the VH comprises one, two or three CDRs selected from: a. CDR-H1, comprising the amino acid sequence SEQ ID NO: 628, b. CDR-H2, comprising the amino acid sequence SEQ ID NO: 1170, and c. CDR-H3, comprising the amino acid sequence SEQ ID NO: 1712.

[1523] In one aspect, an antibody or antigen-binding fragment thereof is provided, wherein the antibody or antigen-binding fragment thereof comprises a light chain variable domain (VL) having at least 90%, 91%, 92%, 93%, 94%, 95%, 96%, 97%, 98%, 99%, or 100% sequence identity to the amino acid sequence SEQ ID NO: 357. In some embodiments, a VL sequence having at least 90%, 91%, 92%, 93%, 94%, 95%, 96%, 97%, 98%, or 99% identity contains substitutions (e.g., conservative substitutions), insertions, or deletions relative to the reference sequence, but an antibody or antigen-binding fragment thereof comprising that sequence retains the ability to bind to same antigen as the parent (e.g., cancer associated antigen). In some embodiments, a total of 1 to 10 amino acids have been substituted, inserted and/or deleted in the amino acid sequence SEQ ID NO: 357. In some embodiments, the substitutions, insertions, or deletions occur in regions outside the CDRs (e.g., in the FRs). Optionally, the antibody or antigen-binding fragment thereof comprises the VL sequence SEQ ID NO: 357, including one or more post-translational modifications of that sequence. In a particular embodiment, the VL comprises one, two or three CDRs selected from: a. CDR-L1, comprising the amino acid sequence SEQ ID NO: 899, b. CDR-L2, comprising the amino acid sequence SEQ ID NO: 1441, and c. CDR-L3, comprising the amino acid sequence SEQ ID NO: 1983.

[1524] In one aspect, an antibody or antigen-binding fragment thereof is provided, wherein the antibody or antigen-binding fragment thereof comprises a VH as in any of the embodiments provided above, and a VL as in any of the embodiments provided above. In some embodiments, the antibody or antigen-binding fragment thereof comprises the VH amino acid sequence of SEQ ID NO: 86, and the VL amino acid sequence of SEQ ID NO: 357, optionally including post-translational modifications of those sequences.

### TCOL1008

[1525] In one aspect, the present disclosure provides an antibody or antigen-binding fragment thereof comprising at least one or both variable regions selected from: a. VH comprising the amino acid sequence of SEQ ID NO: 87 and b. VL comprising the amino acid sequence of SEQ ID NO: 358.

[1526] In one aspect, the present disclosure provides an antibody or antigen-binding fragment thereof comprising at least one, two, three, four, five, or six CDRs selected from: a. CDR-H1 comprising the amino acid sequence of SEQ ID NO: 629, b. CDR-H2 comprising the amino acid sequence of SEQ ID NO: 1171, c. CDR-H3 comprising the amino acid sequence of SEQ ID NO: 1713, d. CDR-L1 comprising the amino acid sequence of SEQ ID NO: 900, e. CDR-L2 comprising the amino acid sequence of SEQ ID NO: 1442, and f. CDR-L3 comprising the amino acid sequence of SEQ ID NO: 1984. In one aspect, the present disclosure provides an antibody or antigen-binding fragment thereof comprising a CDR-H3 comprising the amino acid sequence of SEQ ID NO: 1713, and a CDR-L3 comprising the amino acid sequence of SEQ ID NO: 1984.

[1527] In one aspect, the present disclosure provides an antibody or antigen-binding fragment thereof comprising at least one, at least two, or all three VH CDR sequences selected from: a. CDR-H1 comprising the amino acid sequence of SEQ ID NO: 629, b. CDR-H2 comprising the amino acid sequence of SEQ ID NO: 1171, c. CDR-H3 comprising the amino acid sequence of SEQ ID NO: 1713, and a VL comprising the amino acid sequence of SEQ ID NO: 358.

[1528] In one aspect, the present disclosure provides an antibody or antigen-binding fragment thereof comprising at least one, at least two, or all three VL CDR sequences selected from: a. CDR-L1 comprising the amino acid sequence of SEQ ID NO: 900, b. CDR-L2 comprising the amino acid sequence of SEQ ID NO: 1442, c. CDR-L3 comprising the amino acid sequence of SEQ ID NO: 1984, and a VH comprising the amino acid sequence of SEQ ID NO: 87.

[1529] In one aspect, an antibody or antigen-binding fragment thereof is provided, wherein the antibody or antigen-binding fragment thereof comprises a heavy chain variable domain (VH) having at least 90%, 91%, 92%, 93%, 94%, 95%, 96%, 97%, 98%, 99%, or 100% sequence identity to the amino acid sequence SEQ ID NO: 87. In some embodiments, a VH sequence having at least 90%, 91%, 92%, 93%, 94%, 95%, 96%, 97%, 98%, or 99% identity contains substitutions (e.g., conservative substitutions), insertions, or deletions relative to the reference sequence, but an antibody or antigen-binding fragment thereof comprising that sequence retains the ability to bind to same antigen as of the parent (e.g., cancer associated antigen). In some embodiments, a total of 1 to 10 amino acids have been substituted, inserted and/or deleted in the amino acid sequence SEQ ID NO: 87. In some embodiments, substitutions, insertions, or deletions occur in regions outside the CDRs (e.g., in the FRs). Optionally, the antibody or antigen-binding fragment thereof comprises the VH sequence SEQ ID NO: 87, including one or more post-translational modifications of that sequence. In a particular embodiment, the VH comprises one, two or three CDRs selected from: a. CDR-H1, comprising the amino acid sequence SEQ ID NO: 629, b. CDR-H2, comprising the amino acid sequence SEQ ID NO: 1171, and c. CDR-H3, comprising the amino acid sequence SEQ ID NO: 1713.

[1530] In one aspect, an antibody or antigen-binding fragment thereof is provided, wherein the antibody or antigen-binding fragment thereof comprises a light chain variable domain (VL) having at least 90%, 91%, 92%, 93%, 94%, 95%, 96%, 97%, 98%, 99%, or 100% sequence identity to the amino acid sequence SEQ ID NO: 358. In some embodiments, a VL sequence having at least 90%, 91%, 92%, 93%, 94%, 95%, 96%, 97%, 98%, or 99% identity contains substitutions (e.g., conservative substitutions), insertions, or deletions relative to the reference sequence, but an antibody or antigen-binding fragment thereof comprising that sequence retains the ability to bind to same antigen as the parent (e.g., cancer associated antigen). In some embodiments, a total of 1 to 10 amino acids have been substituted, inserted and/or deleted in the amino acid sequence SEQ ID NO: 358. In some embodiments, the substitutions, insertions, or deletions occur in regions outside the CDRs (e.g., in the FRs). Optionally, the antibody or antigen-binding fragment thereof comprises the VL sequence SEQ ID NO: 358, including one or more post-translational modifications of that sequence. In a particular embodiment, the VL comprises one, two or three CDRs selected from: a. CDR-L1, comprising the amino acid sequence SEQ ID NO: 900, b. CDR-L2, comprising the amino acid sequence SEQ ID NO: 1442, and c. CDR-L3, comprising the amino acid sequence SEQ ID NO: 1984.

[1531] In one aspect, an antibody or antigen-binding fragment thereof is provided, wherein the antibody or antigen-binding fragment thereof comprises a VH as in any of the embodiments provided above, and a VL as in any of the embodiments provided above. In some embodiments, the antibody or antigen-binding fragment thereof comprises the VH amino acid sequence of SEQ ID NO: 87, and the VL amino acid sequence of SEQ ID NO: 358, optionally including post-translational modifications of those sequences.

### TCOL1009

[1532] In one aspect, the present disclosure provides an antibody or antigen-binding fragment thereof comprising at least one or both variable regions selected from: a. VH comprising the amino acid sequence of SEQ ID NO: 88 and b. VL comprising the amino acid sequence of SEQ ID NO: 359.

[1533] In one aspect, the present disclosure provides an antibody or antigen-binding fragment thereof comprising at least one, two, three, four, five, or six CDRs selected from: a. CDR-H1 comprising the amino acid sequence of SEQ ID NO: 630, b. CDR-H2 comprising the amino acid sequence of SEQ ID NO: 1172, c. CDR-H3 comprising the amino acid sequence of SEQ ID NO: 1714, d. CDR-L1 comprising the amino acid sequence of SEQ ID NO: 901, e. CDR-L2 comprising the amino acid sequence of SEQ ID NO: 1443, and f. CDR-L3 comprising the amino acid sequence of SEQ ID NO: 1985.

[1534] In one aspect, the present disclosure provides an antibody or antigen-binding fragment thereof comprising a CDR-H3 comprising the amino acid sequence of SEQ ID NO: 1714, and a CDR-L3 comprising the amino acid sequence of SEQ ID NO: 1985.

[1535] In one aspect, the present disclosure provides an antibody or antigen-binding fragment thereof comprising at least one, at least two, or all three VH CDR sequences selected from: a. CDR-H1 comprising the amino acid sequence of SEQ ID NO: 630, b. CDR-H2 comprising the amino acid sequence of SEQ ID NO: 1172, c. CDR-H3 comprising the amino acid sequence of SEQ ID NO: 1714, and a VL comprising the amino acid sequence of SEQ ID NO: 359.

[1536] In one aspect, the present disclosure provides an antibody or antigen-binding fragment thereof comprising at least one, at least two, or all three VL CDR sequences selected from: a. CDR-L1 comprising the amino acid sequence of SEQ ID NO: 901, b. CDR-L2 comprising the amino acid sequence of SEQ ID NO: 1443, c. CDR-L3 comprising the amino acid sequence of SEQ ID NO: 1985, and a VH comprising the amino acid sequence of SEQ ID NO: 88.

[1537] In one aspect, an antibody or antigen-binding fragment thereof is provided, wherein the antibody or antigen-binding fragment thereof comprises a heavy chain variable domain (VH) having at least 90%, 91%, 92%, 93%, 94%, 95%, 96%, 97%, 98%, 99%, or 100% sequence identity to the amino acid sequence SEQ ID NO: 88. In some embodiments, a VH sequence having at least 90%, 91%, 92%, 93%, 94%, 95%, 96%, 97%, 98%, or 99% identity contains substitutions (e.g., conservative substitutions), insertions, or deletions relative to the reference sequence, but an antibody or antigen-binding fragment thereof comprising that sequence retains the ability to bind to same antigen as of the parent (e.g., cancer associated antigen). In some embodiments, a total of 1 to 10 amino acids have been substituted, inserted and/or deleted in the amino acid sequence SEQ ID NO: 88. In some embodiments, substitutions, insertions, or deletions occur in regions outside the CDRs (e.g., in the FRs). Optionally, the antibody or antigen-binding fragment thereof comprises the VH sequence SEQ ID NO: 88, including one or more post-translational modifications of that sequence. In a particular embodiment, the VH comprises one, two or three CDRs selected from: a. CDR-H1, comprising the amino acid sequence SEQ ID NO: 630, b. CDR-H2, comprising the amino acid sequence SEQ ID NO: 1172, and c. CDR-H3, comprising the amino acid sequence SEQ ID NO: 1714.

[1538] In one aspect, an antibody or antigen-binding fragment thereof is provided, wherein the antibody or antigen-binding fragment thereof comprises a light chain variable domain (VL) having at least 90%, 91%, 92%, 93%, 94%, 95%, 96%, 97%, 98%, 99%, or 100% sequence identity to the amino acid sequence SEQ ID NO: 359. In some embodiments, a VL sequence having at least 90%, 91%, 92%, 93%, 94%, 95%, 96%, 97%, 98%, or 99% identity contains substitutions (e.g., conservative substitutions), insertions, or deletions relative to the reference sequence, but an antibody or antigen-binding fragment thereof comprising that sequence retains the ability to bind to same antigen as the parent (e.g., cancer associated antigen). In some embodiments, a total of 1 to 10 amino acids have been substituted, inserted and/or deleted in the amino acid sequence SEQ ID NO: 359. In some embodiments, the substitutions, insertions, or deletions occur in regions outside the CDRs (e.g., in the FRs). Optionally, the antibody or antigen-binding fragment thereof comprises the VL sequence SEQ ID NO: 359, including one or more post-translational modifications of that sequence. In a particular embodiment, the VL comprises one, two or three CDRs selected from: a. CDR-L1, comprising the amino acid sequence SEQ ID NO: 901, b. CDR-L2, comprising the amino acid sequence SEQ ID NO: 1443, and c. CDR-L3, comprising the amino acid sequence SEQ ID NO: 1985.

[1539] In one aspect, an antibody or antigen-binding fragment thereof is provided, wherein the antibody or antigen-binding fragment thereof comprises a VH as in any of the embodiments provided above, and a VL as in any of the embodiments provided above. In some embodiments, the antibody or antigen-binding fragment thereof comprises the VH amino acid sequence of SEQ ID NO: 88, and the VL amino acid sequence of SEQ ID NO: 359, optionally including post-translational modifications of those sequences. TESO1001

[1540] In one aspect, the present disclosure provides an antibody or antigen-binding fragment thereof comprising at least one or both variable regions selected from: a. VH comprising the amino acid sequence of SEQ ID NO: 89 and b. VL comprising the amino acid sequence of SEQ ID NO: 360.

[1541] In one aspect, the present disclosure provides an antibody or antigen-binding fragment thereof comprising at least one, two, three, four, five, or six CDRs selected from: a. CDR-H1 comprising the amino acid sequence of SEQ ID NO: 631, b. CDR-H2 comprising the amino acid sequence of SEQ ID NO: 1173, c. CDR-H3 comprising the amino acid sequence of SEQ ID NO: 1715, d. CDR-L1 comprising the amino acid sequence of SEQ ID NO: 902, e. CDR-L2 comprising the amino acid sequence of SEQ ID NO: 1444, and f. CDR-L3 comprising the amino acid sequence of SEQ ID NO: 1986.

[1542] In one aspect, the present disclosure provides an antibody or antigen-binding fragment thereof comprising a CDR-H3 comprising the amino acid sequence of SEQ ID NO: 1715, and a CDR-L3 comprising the amino acid sequence of SEQ ID NO: 1986.

[1543] In one aspect, the present disclosure provides an antibody or antigen-binding fragment thereof comprising at least one, at least two, or all three VH CDR sequences selected from: a. CDR-H1 comprising the amino acid sequence of SEQ ID NO: 631, b. CDR-H2 comprising the amino acid sequence of SEQ ID NO: 1173, c. CDR-H3 comprising the amino acid sequence of SEQ ID NO: 1715, and a VL comprising the amino acid sequence of SEQ ID NO: 360.

[1544] In one aspect, the present disclosure provides an antibody or antigen-binding fragment thereof comprising at least one, at least two, or all three VL CDR sequences selected from: a. CDR-L1 comprising the amino acid sequence of SEQ ID NO: 902, b. CDR-L2 comprising the amino acid sequence of SEQ ID NO: 1444, c. CDR-L3 comprising the amino acid sequence of SEQ ID NO: 1986, and a VH comprising the amino acid sequence of SEQ ID NO: 89.

[1545] In one aspect, an antibody or antigen-binding fragment thereof is provided, wherein the antibody or antigen-binding fragment thereof comprises a heavy chain variable domain (VH) having at least 90%, 91%, 92%, 93%, 94%, 95%, 96%, 97%, 98%, 99%, or 100% sequence identity to the amino acid sequence SEQ ID NO: 89. In some embodiments, a VH sequence having at least 90%, 91%, 92%, 93%, 94%, 95%, 96%, 97%, 98%, or 99% identity contains substitutions (e.g., conservative substitutions), insertions, or deletions relative to the reference sequence, but an antibody or antigen-binding fragment thereof comprising that sequence retains the ability to bind to same antigen as of the parent (e.g., cancer associated antigen). In some embodiments, a total of 1 to 10 amino acids have been substituted, inserted and/or deleted in the amino acid sequence SEQ ID NO: 89. In some embodiments, substitutions, insertions, or deletions occur in regions outside the CDRs (e.g., in the FRs). Optionally, the antibody or antigen-binding fragment thereof comprises the VH sequence SEQ ID NO: 89, including one or more post-translational modifications of that sequence. In a particular embodiment, the VH comprises one, two or three CDRs selected from: a. CDR-H1, comprising the amino acid sequence SEQ ID NO: 631, b. CDR-H2, comprising the amino acid sequence SEQ ID NO: 1173, and c. CDR-H3, comprising the amino acid sequence SEQ ID NO: 1715.

[1546] In one aspect, an antibody or antigen-binding fragment thereof is provided, wherein the antibody or antigen-binding fragment thereof comprises a light chain variable domain (VL) having at least 90%, 91%, 92%, 93%, 94%, 95%, 96%, 97%, 98%, 99%, or 100% sequence identity to the amino acid sequence SEQ ID NO: 360. In some embodiments, a VL sequence having at least 90%, 91%, 92%, 93%, 94%, 95%, 96%, 97%, 98%, or 99% identity contains substitutions (e.g., conservative substitutions), insertions, or deletions relative to the reference sequence, but an antibody or antigen-binding fragment thereof comprising that sequence retains the ability to bind to same antigen as the parent (e.g., cancer associated antigen). In some embodiments, a total of 1 to 10 amino acids have been substituted, inserted and/or deleted in the amino acid sequence SEQ ID NO: 360. In some embodiments, the substitutions, insertions, or deletions occur in regions outside the CDRs (e.g., in the FRs). Optionally, the antibody or antigen-binding fragment thereof comprises the VL sequence SEQ ID NO: 360, including one or more post-translational modifications of that sequence. In a particular embodiment, the VL comprises one, two or three CDRs selected from: a. CDR-L1, comprising the amino acid sequence SEQ ID NO: 902, b. CDR-L2, comprising the amino acid sequence SEQ ID NO: 1444, and c. CDR-L3, comprising the amino acid sequence SEQ ID NO: 1986.

[1547] In one aspect, an antibody or antigen-binding fragment thereof is provided, wherein the antibody or antigen-binding fragment thereof comprises a VH as in any of the embodiments provided above, and a VL as in any of the embodiments provided above. In some embodiments, the antibody or antigen-binding fragment thereof comprises the VH amino acid sequence of SEQ ID NO: 89, and the VL amino acid sequence of SEQ ID NO: 360, optionally including post-translational modifications of those sequences.

### TESO1002

[1548] In one aspect, the present disclosure provides an antibody or antigen-binding fragment thereof comprising at least one or both variable regions selected from: a. VH comprising the amino acid sequence of SEQ ID NO: 90 and b. VL comprising the amino acid sequence of SEQ ID NO: 361.

[1549] In one aspect, the present disclosure provides an antibody or antigen-binding fragment thereof comprising at least one, two, three, four, five, or six CDRs selected from: a. CDR-H1 comprising the amino acid sequence of SEQ ID NO: 632, b. CDR-H2 comprising the amino acid sequence of SEQ ID NO: 1174, c. CDR-H3 comprising the amino acid sequence of SEQ ID NO: 1716, d. CDR-L1 comprising the amino acid sequence of SEQ ID NO: 903, e. CDR-L2 comprising the amino acid sequence of SEQ ID NO: 1445, and f. CDR-L3 comprising the amino acid sequence of SEQ ID NO: 1987. In one aspect, the present disclosure provides an antibody or antigen-binding fragment thereof comprising a CDR-H3 comprising the amino acid sequence of SEQ ID NO: 1716, and a CDR-L3 comprising the amino acid sequence of SEQ ID NO: 1987.

[1550] In one aspect, the present disclosure provides an antibody or antigen-binding fragment thereof comprising at least one, at least two, or all three VH CDR sequences selected from: a. CDR-H1 comprising the amino acid sequence of SEQ ID NO: 632, b. CDR-H2 comprising the amino acid sequence of SEQ ID NO: 1174, c. CDR-H3 comprising the amino acid sequence of SEQ ID NO: 1716, and a VL comprising the amino acid sequence of SEQ ID NO: 361.

[1551] In one aspect, the present disclosure provides an antibody or antigen-binding fragment thereof comprising at least one, at least two, or all three VL CDR sequences selected from: a. CDR-L1 comprising the amino acid sequence of SEQ ID NO: 903, b. CDR-L2 comprising the amino acid sequence of SEQ ID NO: 1445, c. CDR-L3 comprising the amino acid sequence of SEQ ID NO: 1987, and a VH comprising the amino acid sequence of SEQ ID NO: 90.

[1552] In one aspect, an antibody or antigen-binding fragment thereof is provided, wherein the antibody or antigen-binding fragment thereof comprises a heavy chain variable domain (VH) having at least 90%, 91%, 92%, 93%, 94%, 95%, 96%, 97%, 98%, 99%, or 100% sequence identity to the amino acid sequence SEQ ID NO: 90. In some embodiments, a VH sequence having at least 90%, 91%, 92%, 93%, 94%, 95%, 96%, 97%, 98%, or 99% identity contains substitutions (e.g., conservative substitutions), insertions, or deletions relative to the reference sequence, but an antibody or antigen-binding fragment thereof comprising that sequence retains the ability to bind to same antigen as of the parent (e.g., cancer associated antigen). In some embodiments, a total of 1 to 10 amino acids have been substituted, inserted and/or deleted in the amino acid sequence SEQ ID NO: 90. In some embodiments, substitutions, insertions, or deletions occur in regions outside the CDRs (e.g., in the FRs). Optionally, the antibody or antigen-binding fragment thereof comprises the VH sequence SEQ ID NO: 90, including one or more post-translational modifications of that sequence. In a particular embodiment, the VH comprises one, two or three CDRs selected from: a. CDR-H1, comprising the amino acid sequence SEQ ID NO: 632, b. CDR-H2, comprising the amino acid sequence SEQ ID NO: 1174, and c. CDR-H3, comprising the amino acid sequence SEQ ID NO: 1716.

[1553] In one aspect, an antibody or antigen-binding fragment thereof is provided, wherein the antibody or antigen-binding fragment thereof comprises a light chain variable domain (VL) having at least 90%, 91%, 92%, 93%, 94%, 95%, 96%, 97%, 98%, 99%, or 100% sequence identity to the amino acid sequence SEQ ID NO: 361. In some embodiments, a VL sequence having at least 90%, 91%, 92%, 93%, 94%, 95%, 96%, 97%, 98%, or 99% identity contains substitutions (e.g., conservative substitutions), insertions, or deletions relative to the reference sequence, but an antibody or antigen-binding fragment thereof comprising that sequence retains the ability to bind to same antigen as the parent (e.g., cancer associated antigen). In some embodiments, a total of 1 to 10 amino acids have been substituted, inserted and/or deleted in the amino acid sequence SEQ ID NO: 361. In some embodiments, the substitutions, insertions, or deletions occur in regions outside the CDRs (e.g., in the FRs). Optionally, the antibody or antigen-binding fragment thereof comprises the VL sequence SEQ ID NO: 361, including one or more post-translational modifications of that sequence. In a particular embodiment, the VL comprises one, two or three CDRs selected from: a. CDR-L1, comprising the amino acid sequence SEQ ID NO: 903, b. CDR-L2, comprising the amino acid sequence SEQ ID NO: 1445, and c. CDR-L3, comprising the amino acid sequence SEQ ID NO: 1987.

[1554] In one aspect, an antibody or antigen-binding fragment thereof is provided, wherein the antibody or antigen-binding fragment thereof comprises a VH as in any of the embodiments provided above, and a VL as in any of the embodiments provided above. In some embodiments, the antibody or antigen-binding fragment thereof comprises the VH amino acid sequence of SEQ ID NO: 90, and the VL amino acid sequence of SEQ ID NO: 361, optionally including post-translational modifications of those sequences. TESO1003

[1555] In one aspect, the present disclosure provides an antibody or antigen-binding fragment thereof comprising at least one or both variable regions selected from: a. VH comprising the amino acid sequence of SEQ ID NO: 91 and b. VL comprising the amino acid sequence of SEQ ID NO: 362.

[1556] In one aspect, the present disclosure provides an antibody or antigen-binding fragment thereof comprising at least one, two, three, four, five, or six CDRs selected from: a. CDR-H1 comprising the amino acid sequence of SEQ ID NO: 633, b. CDR-H2 comprising the amino acid sequence of SEQ ID NO: 1175, c. CDR-H3 comprising the amino acid sequence of SEQ ID NO: 1717, d. CDR-L1 comprising the amino acid sequence of SEQ ID NO: 904, e. CDR-L2 comprising the amino acid sequence of SEQ ID NO: 1446, and f. CDR-L3 comprising the amino acid sequence of SEQ ID NO: 1988.

[1557] In one aspect, the present disclosure provides an antibody or antigen-binding fragment thereof comprising a CDR-H3 comprising the amino acid sequence of SEQ ID NO: 1717, and a CDR-L3 comprising the amino acid sequence of SEQ ID NO: 1988.

[1558] In one aspect, the present disclosure provides an antibody or antigen-binding fragment thereof comprising at least one, at least two, or all three VH CDR sequences selected from: a. CDR-H1 comprising the amino acid sequence of SEQ ID NO: 633, b. CDR-H2 comprising the amino acid sequence of SEQ ID NO: 1175, c. CDR-H3 comprising the amino acid sequence of SEQ ID NO: 1717, and a VL comprising the amino acid sequence of SEQ ID NO: 362.

[1559] In one aspect, the present disclosure provides an antibody or antigen-binding fragment thereof comprising at least one, at least two, or all three VL CDR sequences selected from: a. CDR-L1 comprising the amino acid sequence of SEQ ID NO: 904, b. CDR-L2 comprising the amino acid sequence of SEQ ID NO: 1446, c. CDR-L3 comprising the amino acid sequence of SEQ ID NO: 1988, and a VH comprising the amino acid sequence of SEQ ID NO: 91.

[1560] In one aspect, an antibody or antigen-binding fragment thereof is provided, wherein the antibody or antigen-binding fragment thereof comprises a heavy chain variable domain (VH) having at least 90%, 91%, 92%, 93%, 94%, 95%, 96%, 97%, 98%, 99%, or 100% sequence identity to the amino acid sequence SEQ ID NO: 91. In some embodiments, a VH sequence having at least 90%, 91%, 92%, 93%, 94%, 95%, 96%, 97%, 98%, or 99% identity contains substitutions (e.g., conservative substitutions), insertions, or deletions relative to the reference sequence, but an antibody or antigen-binding fragment thereof comprising that sequence retains the ability to bind to same antigen as of the parent (e.g., cancer associated antigen). In some embodiments, a total of 1 to 10 amino acids have been substituted, inserted and/or deleted in the amino acid sequence SEQ ID NO: 91. In some embodiments, substitutions, insertions, or deletions occur in regions outside the CDRs (e.g., in the FRs). Optionally, the antibody or antigen-binding fragment thereof comprises the VH sequence SEQ ID NO: 91, including one or more post-translational modifications of that sequence. In a particular embodiment, the VH comprises one, two or three CDRs selected from: a. CDR-H1, comprising the amino acid sequence SEQ ID NO: 633, b. CDR-H2, comprising the amino acid sequence SEQ ID NO: 1175, and c. CDR-H3, comprising the amino acid sequence SEQ ID NO: 1717.

[1561] In one aspect, an antibody or antigen-binding fragment thereof is provided, wherein the antibody or antigen-binding fragment thereof comprises a light chain variable domain (VL) having at least 90%, 91%, 92%, 93%, 94%, 95%, 96%, 97%, 98%, 99%, or 100% sequence identity to the amino acid sequence SEQ ID NO: 362. In some embodiments, a VL sequence having at least 90%, 91%, 92%, 93%, 94%, 95%, 96%, 97%, 98%, or 99% identity contains substitutions (e.g., conservative substitutions), insertions, or deletions relative to the reference sequence, but an antibody or antigen-binding fragment thereof comprising that sequence retains the ability to bind to same antigen as the parent (e.g., cancer associated antigen). In some embodiments, a total of 1 to 10 amino acids have been substituted, inserted and/or deleted in the amino acid sequence SEQ ID NO: 362. In some embodiments, the substitutions, insertions, or deletions occur in regions outside the CDRs (e.g., in the FRs). Optionally, the antibody or antigen-binding fragment thereof comprises the VL sequence SEQ ID NO: 362, including one or more post-translational modifications of that sequence. In a particular embodiment, the VL comprises one, two or three CDRs selected from: a. CDR-L1, comprising the amino acid sequence SEQ ID NO: 904, b. CDR-L2, comprising the amino acid sequence SEQ ID NO: 1446, and c. CDR-L3, comprising the amino acid sequence SEQ ID NO: 1988.

[1562] In one aspect, an antibody or antigen-binding fragment thereof is provided, wherein the antibody or antigen-binding fragment thereof comprises a VH as in any of the embodiments provided above, and a VL as in any of the embodiments provided above. In some embodiments, the antibody or antigen-binding fragment thereof comprises the VH amino acid sequence of SEQ ID NO: 91, and the VL amino acid sequence of SEQ ID NO: 362, optionally including post-translational modifications of those sequences. TESO1004

[1563] In one aspect, the present disclosure provides an antibody or antigen-binding fragment thereof comprising at least one or both variable regions selected from: a. VH comprising the amino acid sequence of SEQ ID NO: 92 and b. VL comprising the amino acid sequence of SEQ ID NO: 363.

[1564] In one aspect, the present disclosure provides an antibody or antigen-binding fragment thereof comprising at least one, two, three, four, five, or six CDRs selected from: a. CDR-H1 comprising the amino acid sequence of SEQ ID NO: 634, b. CDR-H2 comprising the amino acid sequence of SEQ ID NO: 1176, c. CDR-H3 comprising the amino acid sequence of SEQ ID NO: 1718, d. CDR-L1 comprising the amino acid sequence of SEQ ID NO: 905, e. CDR-L2 comprising the amino acid sequence of SEQ ID NO: 1447, and f. CDR-L3 comprising the amino acid sequence of SEQ ID NO: 1989.

[1565] In one aspect, the present disclosure provides an antibody or antigen-binding fragment thereof comprising a CDR-H3 comprising the amino acid sequence of SEQ ID NO: 1718, and a CDR-L3 comprising the amino acid sequence of SEQ ID NO: 1989.

[1566] In one aspect, the present disclosure provides an antibody or antigen-binding fragment thereof comprising at least one, at least two, or all three VH CDR sequences selected from: a. CDR-H1 comprising the amino acid sequence of SEQ ID NO: 634, b. CDR-H2 comprising the amino acid sequence of SEQ ID NO: 1176, c. CDR-H3 comprising the amino acid sequence of SEQ ID NO: 1718, and a VL comprising the amino acid sequence of SEQ ID NO: 363.

[1567] In one aspect, the present disclosure provides an antibody or antigen-binding fragment thereof comprising at least one, at least two, or all three VL CDR sequences selected from: a. CDR-L1 comprising the amino acid sequence of SEQ ID NO: 905, b. CDR-L2 comprising the amino acid sequence of SEQ ID NO: 1447, c. CDR-L3 comprising the amino acid sequence of SEQ ID NO: 1989, and a VH comprising the amino acid sequence of SEQ ID NO: 92.

[1568] In one aspect, an antibody or antigen-binding fragment thereof is provided, wherein the antibody or antigen-binding fragment thereof comprises a heavy chain variable domain (VH) having at least 90%, 91%, 92%, 93%, 94%, 95%, 96%, 97%, 98%, 99%, or 100% sequence identity to the amino acid sequence SEQ ID NO: 92. In some embodiments, a VH sequence having at least 90%, 91%, 92%, 93%, 94%, 95%, 96%, 97%, 98%, or 99% identity contains substitutions (e.g., conservative substitutions), insertions, or deletions relative to the reference sequence, but an antibody or antigen-binding fragment thereof comprising that sequence retains the ability to bind to same antigen as of the parent (e.g., cancer associated antigen). In some embodiments, a total of 1 to 10 amino acids have been substituted, inserted and/or deleted in the amino acid sequence SEQ ID NO: 92. In some embodiments, substitutions, insertions, or deletions occur in regions outside the CDRs (e.g., in the FRs). Optionally, the antibody or antigen-binding fragment thereof comprises the VH sequence SEQ ID NO: 92, including one or more post-translational modifications of that sequence. In a particular embodiment, the VH comprises one, two or three CDRs selected from: a. CDR-H1, comprising the amino acid sequence SEQ ID NO: 634, b. CDR-H2, comprising the amino acid sequence SEQ ID NO: 1176, and c. CDR-H3, comprising the amino acid sequence SEQ ID NO: 1718.

[1569] In one aspect, an antibody or antigen-binding fragment thereof is provided, wherein the antibody or antigen-binding fragment thereof comprises a light chain variable domain (VL) having at least 90%, 91%, 92%, 93%, 94%, 95%, 96%, 97%, 98%, 99%, or 100% sequence identity to the amino acid sequence SEQ ID NO: 363. In some embodiments, a VL sequence having at least 90%, 91%, 92%, 93%, 94%, 95%, 96%, 97%, 98%, or 99% identity contains substitutions (e.g., conservative substitutions), insertions, or deletions relative to the reference sequence, but an antibody or antigen-binding fragment thereof comprising that sequence retains the ability to bind to same antigen as the parent (e.g., cancer associated antigen). In some embodiments, a total of 1 to 10 amino acids have been substituted, inserted and/or deleted in the amino acid sequence SEQ ID NO: 363. In some embodiments, the substitutions, insertions, or deletions occur in regions outside the CDRs (e.g., in the FRs). Optionally, the antibody or antigen-binding fragment thereof comprises the VL sequence SEQ ID NO: 363, including one or more post-translational modifications of that sequence. In a particular embodiment, the VL comprises one, two or three CDRs selected from: a. CDR-L1, comprising the amino acid sequence SEQ ID NO: 905, b. CDR-L2, comprising the amino acid sequence SEQ ID NO: 1447, and c. CDR-L3, comprising the amino acid sequence SEQ ID NO: 1989.

[1570] In one aspect, an antibody or antigen-binding fragment thereof is provided, wherein the antibody or antigen-binding fragment thereof comprises a VH as in any of the embodiments provided above, and a VL as in any of the embodiments provided above. In some embodiments, the antibody or antigen-binding fragment thereof comprises the VH amino acid sequence of SEQ ID NO: 92, and the VL amino acid sequence of SEQ ID NO: 363, optionally including post-translational modifications of those sequences.

### TESO1005

[1571] In one aspect, the present disclosure provides an antibody or antigen-binding fragment thereof comprising at least one or both variable regions selected from: a VH comprising the amino acid sequence of SEQ ID NO: 93 and b. VL comprising the amino acid sequence of SEQ ID NO: 364.

[1572] In one aspect, the present disclosure provides an antibody or antigen-binding fragment thereof comprising at least one, two, three, four, five, or six CDRs selected from: a. CDR-H1 comprising the amino acid sequence of SEQ ID NO: 635, b. CDR-H2 comprising the amino acid sequence of SEQ ID NO: 1177, c. CDR-H3 comprising the amino acid sequence of SEQ ID NO: 1719, d. CDR-L1 comprising the amino acid sequence of SEQ ID NO: 906, e. CDR-L2 comprising the amino acid sequence of SEQ ID NO: 1448, and f. CDR-L3 comprising the amino acid sequence of SEQ ID NO: 1990.

[1573] In one aspect, the present disclosure provides an antibody or antigen-binding fragment thereof comprising a CDR-H3 comprising the amino acid sequence of SEQ ID NO: 1719, and a CDR-L3 comprising the amino acid sequence of SEQ ID NO: 1990.

[1574] In one aspect, the present disclosure provides an antibody or antigen-binding fragment thereof comprising at least one, at least two, or all three VH CDR sequences selected from: a. CDR-H1 comprising the amino acid sequence of SEQ ID NO: 635, b. CDR-H2 comprising the amino acid sequence of SEQ ID NO: 1177, c. CDR-H3 comprising the amino acid sequence of SEQ ID NO: 1719, and a VL comprising the amino acid sequence of SEQ ID NO: 364.

[1575] In one aspect, the present disclosure provides an antibody or antigen-binding fragment thereof comprising at least one, at least two, or all three VL CDR sequences selected from: a. CDR-L1 comprising the amino acid sequence of SEQ ID NO: 906, b. CDR-L2 comprising the amino acid sequence of SEQ ID NO: 1448, c. CDR-L3 comprising the amino acid sequence of SEQ ID NO: 1990, and a VH comprising the amino acid sequence of SEQ ID NO: 93.

[1576] In one aspect, an antibody or antigen-binding fragment thereof is provided, wherein the antibody or antigen-binding fragment thereof comprises a heavy chain variable domain (VH) having at least 90%, 91%, 92%, 93%, 94%, 95%, 96%, 97%, 98%, 99%, or 100% sequence identity to the amino acid sequence SEQ ID NO: 93. In some embodiments, a VH sequence having at least 90%, 91%, 92%, 93%, 94%, 95%, 96%, 97%, 98%, or 99% identity contains substitutions (e.g., conservative substitutions), insertions, or deletions relative to the reference sequence, but an antibody or antigen-binding fragment thereof comprising that sequence retains the ability to bind to same antigen as of the parent (e.g., cancer associated antigen). In some embodiments, a total of 1 to 10 amino acids have been substituted, inserted and/or deleted in the amino acid sequence SEQ ID NO: 93. In some embodiments, substitutions, insertions, or deletions occur in regions outside the CDRs (e.g., in the FRs). Optionally, the antibody or antigen-binding fragment thereof comprises the VH sequence SEQ ID NO: 93, including one or more post-translational modifications of that sequence. In a particular embodiment, the VH comprises one, two or three CDRs selected from: a. CDR-H1, comprising the amino acid sequence SEQ ID NO: 635, b. CDR-H2, comprising the amino acid sequence SEQ ID NO: 1177, and c. CDR-H3, comprising the amino acid sequence SEQ ID NO: 1719.

[1577] In one aspect, an antibody or antigen-binding fragment thereof is provided, wherein the antibody or antigen-binding fragment thereof comprises a light chain variable domain (VL) having at least 90%, 91%, 92%, 93%, 94%, 95%, 96%, 97%, 98%, 99%, or 100% sequence identity to the amino acid sequence SEQ ID NO: 364. In some embodiments, a VL sequence having at least 90%, 91%, 92%, 93%, 94%, 95%, 96%, 97%, 98%, or 99% identity contains substitutions (e.g., conservative substitutions), insertions, or deletions relative to the reference sequence, but an antibody or antigen-binding fragment thereof comprising that sequence retains the ability to bind to same antigen as the parent (e.g., cancer associated antigen). In some embodiments, a total of 1 to 10 amino acids have been substituted, inserted and/or deleted in the amino acid sequence SEQ ID NO: 364. In some embodiments, the substitutions, insertions, or deletions occur in regions outside the CDRs (e.g., in the FRs). Optionally, the antibody or antigen-binding fragment thereof comprises the VL sequence SEQ ID NO: 364, including one or more post-translational modifications of that sequence. In a particular embodiment, the VL comprises one, two or three CDRs selected from: a. CDR-L1, comprising the amino acid sequence SEQ ID NO: 906, b. CDR-L2, comprising the amino acid sequence SEQ ID NO: 1448, and c. CDR-L3, comprising the amino acid sequence SEQ ID NO: 1990.

[1578] In one aspect, an antibody or antigen-binding fragment thereof is provided, wherein the antibody or antigen-binding fragment thereof comprises a VH as in any of the embodiments provided above, and a VL as in any of the embodiments provided above. In some embodiments, the antibody or antigen-binding fragment thereof comprises the VH amino acid sequence of SEQ ID NO: 93, and the VL amino acid sequence of SEQ ID NO: 364, optionally including post-translational modifications of those sequences.

### TESO1006

[1579] In one aspect, the present disclosure provides an antibody or antigen-binding fragment thereof comprising at least one or both variable regions selected from: a. VH comprising the amino acid sequence of SEQ ID NO: 94 and b. VL comprising the amino acid sequence of SEQ ID NO: 365.

[1580] In one aspect, the present disclosure provides an antibody or antigen-binding fragment thereof comprising at least one, two, three, four, five, or six CDRs selected from: a. CDR-H1 comprising the amino acid sequence of SEQ ID NO: 636, b. CDR-H2 comprising the amino acid sequence of SEQ ID NO: 1178, c. CDR-H3 comprising the amino acid sequence of SEQ ID NO: 1720, d. CDR-L1 comprising the amino acid sequence of SEQ ID NO: 907, e. CDR-L2 comprising the amino acid sequence of SEQ ID NO: 1449, and f. CDR-L3 comprising the amino acid sequence of SEQ ID NO: 1991.

[1581] In one aspect, the present disclosure provides an antibody or antigen-binding fragment thereof comprising at least one, at least two, or all three VH CDR sequences selected from: a. CDR-H1 comprising the amino acid sequence of SEQ ID NO: 636, b. CDR-H2 comprising the amino acid sequence of SEQ ID NO: 1178, c. CDR-H3 comprising the amino acid sequence of SEQ ID NO: 1720, and a VL comprising the amino acid sequence of SEQ ID NO: 365.

[1582] In one aspect, the present disclosure provides an antibody or antigen-binding fragment thereof comprising at least one, at least two, or all three VL CDR sequences selected from: a. CDR-L1 comprising the amino acid sequence of SEQ ID NO: 907, b. CDR-L2 comprising the amino acid sequence of SEQ ID NO: 1449, c. CDR-L3 comprising the amino acid sequence of SEQ ID NO: 1991, and a VH comprising the amino acid sequence of SEQ ID NO: 94.

[1583] In one aspect, an antibody or antigen-binding fragment thereof is provided, wherein the antibody or antigen-binding fragment thereof comprises a heavy chain variable domain (VH) having at least 90%, 91%, 92%, 93%, 94%, 95%, 96%, 97%, 98%, 99%, or 100% sequence identity to the amino acid sequence SEQ ID NO: 94. In some embodiments, a VH sequence having at least 90%, 91%, 92%, 93%, 94%, 95%, 96%, 97%, 98%, or 99% identity contains substitutions (e.g., conservative substitutions), insertions, or deletions relative to the reference sequence, but an antibody or antigen-binding fragment thereof comprising that sequence retains the ability to bind to same antigen as of the parent (e.g., cancer associated antigen). In some embodiments, a total of 1 to 10 amino acids have been substituted, inserted and/or deleted in the amino acid sequence SEQ ID NO: 94. In some embodiments, substitutions, insertions, or deletions occur in regions outside the CDRs (e.g., in the FRs). Optionally, the antibody or antigen-binding fragment thereof comprises the VH sequence SEQ ID NO: 94, including one or more post-translational modifications of that sequence. In a particular embodiment, the VH comprises one, two or three CDRs selected from: a. CDR-H1, comprising the amino acid sequence SEQ ID NO: 636, b. CDR-H2, comprising the amino acid sequence SEQ ID NO: 1178, and c. CDR-H3, comprising the amino acid sequence SEQ ID NO: 1720.

[1584] In one aspect, an antibody or antigen-binding fragment thereof is provided, wherein the antibody or antigen-binding fragment thereof comprises a light chain variable domain (VL) having at least 90%, 91%, 92%, 93%, 94%, 95%, 96%, 97%, 98%, 99%, or 100% sequence identity to the amino acid sequence SEQ ID NO: 365. In some embodiments, a VL sequence having at least 90%, 91%, 92%, 93%, 94%, 95%, 96%, 97%, 98%, or 99% identity contains substitutions (e.g., conservative substitutions), insertions, or deletions relative to the reference sequence, but an antibody or antigen-binding fragment thereof comprising that sequence retains the ability to bind to same antigen as the parent (e.g., cancer associated antigen). In some embodiments, a total of 1 to 10 amino acids have been substituted, inserted and/or deleted in the amino acid sequence SEQ ID NO: 365. In some embodiments, the substitutions, insertions, or deletions occur in regions outside the CDRs (e.g., in the FRs). Optionally, the antibody or antigen-binding fragment thereof comprises the VL sequence SEQ ID NO: 365, including one or more post-translational modifications of that sequence. In a particular embodiment, the VL comprises one, two or three CDRs selected from: a. CDR-L1, comprising the amino acid sequence SEQ ID NO: 907, b. CDR-L2, comprising the amino acid sequence SEQ ID NO: 1449, and c. CDR-L3, comprising the amino acid sequence SEQ ID NO: 1991.

[1585] In one aspect, an antibody or antigen-binding fragment thereof is provided, wherein the antibody or antigen-binding fragment thereof comprises a VH as in any of the embodiments provided above, and a VL as in any of the embodiments provided above. In some embodiments, the antibody or antigen-binding fragment thereof comprises the VH amino acid sequence of SEQ ID NO: 94, and the VL amino acid sequence of SEQ ID NO: 365, optionally including post-translational modifications of those sequences.

### TESO1007

[1586] In one aspect, the present disclosure provides an antibody or antigen-binding fragment thereof comprising at least one or both variable regions selected from: a VH comprising the amino acid sequence of SEQ ID NO: 95 and b. VL comprising the amino acid sequence of SEQ ID NO: 366.

[1587] In one aspect, the present disclosure provides an antibody or antigen-binding fragment thereof comprising at least one, two, three, four, five, or six CDRs selected from: a. CDR-H1 comprising the amino acid sequence of SEQ ID NO: 637, b. CDR-H2 comprising the amino acid sequence of SEQ ID NO: 1179, c. CDR-H3 comprising the amino acid sequence of SEQ ID NO: 1721, d. CDR-L1 comprising the amino acid sequence of SEQ ID NO: 908, e. CDR-L2 comprising the amino acid sequence of SEQ ID NO: 1450, and f. CDR-L3 comprising the amino acid sequence of SEQ ID NO: 1992.

[1588] In one aspect, the present disclosure provides an antibody or antigen-binding fragment thereof comprising a CDR-H3 comprising the amino acid sequence of SEQ ID NO: 1721, and a CDR-L3 comprising the amino acid sequence of SEQ ID NO: 1992.

[1589] In one aspect, the present disclosure provides an antibody or antigen-binding fragment thereof comprising at least one, at least two, or all three VH CDR sequences selected from: a. CDR-H1 comprising the amino acid sequence of SEQ ID NO: 637, b. CDR-H2 comprising the amino acid sequence of SEQ ID NO: 1179, c. CDR-H3 comprising the amino acid sequence of SEQ ID NO: 1721, and a VL comprising the amino acid sequence of SEQ ID NO: 366.

[1590] In one aspect, the present disclosure provides an antibody or antigen-binding fragment thereof comprising at least one, at least two, or all three VL CDR sequences selected from: a. CDR-L1 comprising the amino acid sequence of SEQ ID NO: 908, b. CDR-L2 comprising the amino acid sequence of SEQ ID NO: 1450, c. CDR-L3 comprising the amino acid sequence of SEQ ID NO: 1992, and a VH comprising the amino acid sequence of SEQ ID NO: 95.

[1591] In one aspect, an antibody or antigen-binding fragment thereof is provided, wherein the antibody or antigen-binding fragment thereof comprises a heavy chain variable domain (VH) having at least 90%, 91%, 92%, 93%, 94%, 95%, 96%, 97%, 98%, 99%, or 100% sequence identity to the amino acid sequence SEQ ID NO: 95. In some embodiments, a VH sequence having at least 90%, 91%, 92%, 93%, 94%, 95%, 96%, 97%, 98%, or 99% identity contains substitutions (e.g., conservative substitutions), insertions, or deletions relative to the reference sequence, but an antibody or antigen-binding fragment thereof comprising that sequence retains the ability to bind to same antigen as of the parent (e.g., cancer associated antigen). In some embodiments, a total of 1 to 10 amino acids have been substituted, inserted and/or deleted in the amino acid sequence SEQ ID NO: 95. In some embodiments, substitutions, insertions, or deletions occur in regions outside the CDRs (e.g., in the FRs). Optionally, the antibody or antigen-binding fragment thereof comprises the VH sequence SEQ ID NO: 95, including one or more post-translational modifications of that sequence. In a particular embodiment, the VH comprises one, two or three CDRs selected from: a. CDR-H1, comprising the amino acid sequence SEQ ID NO: 637, b. CDR-H2, comprising the amino acid sequence SEQ ID NO: 1179, and c. CDR-H3, comprising the amino acid sequence SEQ ID NO: 1721.

[1592] In one aspect, an antibody or antigen-binding fragment thereof is provided, wherein the antibody or antigen-binding fragment thereof comprises a light chain variable domain (VL) having at least 90%, 91%, 92%, 93%, 94%, 95%, 96%, 97%, 98%, 99%, or 100% sequence identity to the amino acid sequence SEQ ID NO: 366. In some embodiments, a VL sequence having at least 90%, 91%, 92%, 93%, 94%, 95%, 96%, 97%, 98%, or 99% identity contains substitutions (e.g., conservative substitutions), insertions, or deletions relative to the reference sequence, but an antibody or antigen-binding fragment thereof comprising that sequence retains the ability to bind to same antigen as the parent (e.g., cancer associated antigen). In some embodiments, a total of 1 to 10 amino acids have been substituted, inserted and/or deleted in the amino acid sequence SEQ ID NO: 366. In some embodiments, the substitutions, insertions, or deletions occur in regions outside the CDRs (e.g., in the FRs). Optionally, the antibody or antigen-binding fragment thereof comprises the VL sequence SEQ ID NO: 366, including one or more post-translational modifications of that sequence. In a particular embodiment, the VL comprises one, two or three CDRs selected from: a. CDR-L1, comprising the amino acid sequence SEQ ID NO: 908, b. CDR-L2, comprising the amino acid sequence SEQ ID NO: 1450, and c. CDR-L3, comprising the amino acid sequence SEQ ID NO: 1992.

[1593] In one aspect, an antibody or antigen-binding fragment thereof is provided, wherein the antibody or antigen-binding fragment thereof comprises a VH as in any of the embodiments provided above, and a VL as in any of the embodiments provided above. In some embodiments, the antibody or antigen-binding fragment thereof comprises the VH amino acid sequence of SEQ ID NO: 95, and the VL amino acid sequence of SEQ ID NO: 366, optionally including post-translational modifications of those sequences.

### THNS1001

[1594] In one aspect, the present disclosure provides an antibody or antigen-binding fragment thereof comprising at least one or both variable regions selected from: a. VH comprising the amino acid sequence of SEQ ID NO: 96 and VL comprising the amino acid sequence of SEQ ID NO: 367.

[1595] In one aspect, the present disclosure provides an antibody or antigen-binding fragment thereof comprising at least one, two, three, four, five, or six CDRs selected from: a. CDR-H1 comprising the amino acid sequence of SEQ ID NO: 638, b. CDR-H2 comprising the amino acid sequence of SEQ ID NO: 1180, c. CDR-H3 comprising the amino acid sequence of SEQ ID NO: 1722, d. CDR-L1 comprising the amino acid sequence of SEQ ID NO: 909, e. CDR-L2 comprising the amino acid sequence of SEQ ID NO: 1451, f. CDR-L3 comprising the amino acid sequence of SEQ ID NO: 1993.

[1596] In one aspect, the present disclosure provides an antibody or antigen-binding fragment thereof comprising a CDR-H3 comprising the amino acid sequence of SEQ ID NO: 1722, and a CDR-L3 comprising the amino acid sequence of SEQ ID NO: 1993.

[1597] In one aspect, the present disclosure provides an antibody or antigen-binding fragment thereof comprising at least one, at least two, or all three VH CDR sequences selected from: a. CDR-H1 comprising the amino acid sequence of SEQ ID NO: 638, b. CDR-H2 comprising the amino acid sequence of SEQ ID NO: 1180, c. CDR-H3 comprising the amino acid sequence of SEQ ID NO: 1722, and a VL comprising the amino acid sequence of SEQ ID NO: 367.

[1598] In one aspect, the present disclosure provides an antibody or antigen-binding fragment thereof comprising at least one, at least two, or all three VL CDR sequences selected from: a. CDR-L1 comprising the amino acid sequence of SEQ ID NO: 909, b. CDR-L2 comprising the amino acid sequence of SEQ ID NO: 1451, c. CDR-L3 comprising the amino acid sequence of SEQ ID NO: 1993, and a VH comprising the amino acid sequence of SEQ ID NO: 96.

[1599] In one aspect, an antibody or antigen-binding fragment thereof is provided, wherein the antibody or antigen-binding fragment thereof comprises a heavy chain variable domain (VH) having at least 90%, 91%, 92%, 93%, 94%, 95%, 96%, 97%, 98%, 99%, or 100% sequence identity to the amino acid sequence SEQ ID NO: 96. In some embodiments, a VH sequence having at least 90%, 91%, 92%, 93%, 94%, 95%, 96%, 97%, 98%, or 99% identity contains substitutions (e.g., conservative substitutions), insertions, or deletions relative to the reference sequence, but an antibody or antigen-binding fragment thereof comprising that sequence retains the ability to bind to same antigen as of the parent (e.g., cancer associated antigen). In some embodiments, a total of 1 to 10 amino acids have been substituted, inserted and/or deleted in the amino acid sequence SEQ ID NO: 96. In some embodiments, substitutions, insertions, or deletions occur in regions outside the CDRs (e.g., in the FRs). Optionally, the antibody or antigen-binding fragment thereof comprises the VH sequence SEQ ID NO: 96, including one or more post-translational modifications of that sequence. In a particular embodiment, the VH comprises one, two or three CDRs selected from: a. CDR-H1, comprising the amino acid sequence SEQ ID NO: 638, b. CDR-H2, comprising the amino acid sequence SEQ ID NO: 1180, and c. CDR-H3, comprising the amino acid sequence SEQ ID NO: 1722.

[1600] In one aspect, an antibody or antigen-binding fragment thereof is provided, wherein the antibody or antigen-binding fragment thereof comprises a light chain variable domain (VL) having at least 90%, 91%, 92%, 93%, 94%, 95%, 96%, 97%, 98%, 99%, or 100% sequence identity to the amino acid sequence SEQ ID NO: 367. In some embodiments, a VL sequence having at least 90%, 91%, 92%, 93%, 94%, 95%, 96%, 97%, 98%, or 99% identity contains substitutions (e.g., conservative substitutions), insertions, or deletions relative to the reference sequence, but an antibody or antigen-binding fragment thereof comprising that sequence retains the ability to bind to same antigen as the parent (e.g., cancer associated antigen). In some embodiments, a total of 1 to 10 amino acids have been substituted, inserted and/or deleted in the amino acid sequence SEQ ID NO: 367. In some embodiments, the substitutions, insertions, or deletions occur in regions outside the CDRs (e.g., in the FRs). Optionally, the antibody or antigen-binding fragment thereof comprises the VL sequence SEQ ID NO: 367, including one or more post-translational modifications of that sequence. In a particular embodiment, the VL comprises one, two or three CDRs selected from: a. CDR-L1, comprising the amino acid sequence SEQ ID NO: 909, b. CDR-L2, comprising the amino acid sequence SEQ ID NO: 1451, and c. CDR-L3, comprising the amino acid sequence SEQ ID NO: 1993.

[1601] In one aspect, an antibody or antigen-binding fragment thereof is provided, wherein the antibody or antigen-binding fragment thereof comprises a VH as in any of the embodiments provided above, and a VL as in any of the embodiments provided above. In some embodiments, the antibody or antigen-binding fragment thereof comprises the VH amino acid sequence of SEQ ID NO: 96, and the VL amino acid sequence of SEQ ID NO: 367, optionally including post-translational modifications of those sequences.

### THNS1002

[1602] In one aspect, the present disclosure provides an antibody or antigen-binding fragment thereof comprising at least one or both variable regions selected from: a. VH comprising the amino acid sequence of SEQ ID NO: 97 and b. VL comprising the amino acid sequence of SEQ ID NO: 368.

[1603] In one aspect, the present disclosure provides an antibody or antigen-binding fragment thereof comprising at least one, two, three, four, five, or six CDRs selected from: a. CDR-H1 comprising the amino acid sequence of SEQ ID NO: 639, b. CDR-H2 comprising the amino acid sequence of SEQ ID NO: 1181, c. CDR-H3 comprising the amino acid sequence of SEQ ID NO: 1723, d. CDR-L1 comprising the amino acid sequence of SEQ ID NO: 910, e. CDR-L2 comprising the amino acid sequence of SEQ ID NO: 1452, and f. CDR-L3 comprising the amino acid sequence of SEQ ID NO: 1994.

[1604] In one aspect, the present disclosure provides an antibody or antigen-binding fragment thereof comprising a CDR-H3 comprising the amino acid sequence of SEQ ID NO: 1723, and a CDR-L3 comprising the amino acid sequence of SEQ ID NO: 1994.

[1605] In one aspect, the present disclosure provides an antibody or antigen-binding fragment thereof comprising at least one, at least two, or all three VH CDR sequences selected from: a. CDR-H1 comprising the amino acid sequence of SEQ ID NO: 639, b. CDR-H2 comprising the amino acid sequence of SEQ ID NO: 1181, c. CDR-H3 comprising the amino acid sequence of SEQ ID NO: 1723, and a VL comprising the amino acid sequence of SEQ ID NO: 368.

[1606] In one aspect, the present disclosure provides an antibody or antigen-binding fragment thereof comprising at least one, at least two, or all three VL CDR sequences selected from: a. CDR-L1 comprising the amino acid sequence of SEQ ID NO: 910, b. CDR-L2 comprising the amino acid sequence of SEQ ID NO: 1452, c. CDR-L3 comprising the amino acid sequence of SEQ ID NO: 1994, and a VH comprising the amino acid sequence of SEQ ID NO: 97.

[1607] In one aspect, an antibody or antigen-binding fragment thereof is provided, wherein the antibody or antigen-binding fragment thereof comprises a heavy chain variable domain (VH) having at least 90%, 91%, 92%, 93%, 94%, 95%, 96%, 97%, 98%, 99%, or 100% sequence identity to the amino acid sequence SEQ ID NO: 97. In some embodiments, a VH sequence having at least 90%, 91%, 92%, 93%, 94%, 95%, 96%, 97%, 98%, or 99% identity contains substitutions (e.g., conservative substitutions), insertions, or deletions relative to the reference sequence, but an antibody or antigen-binding fragment thereof comprising that sequence retains the ability to bind to same antigen as of the parent (e.g., cancer associated antigen). In some embodiments, a total of 1 to 10 amino acids have been substituted, inserted and/or deleted in the amino acid sequence SEQ ID NO: 97. In some embodiments, substitutions, insertions, or deletions occur in regions outside the CDRs (e.g., in the FRs). Optionally, the antibody or antigen-binding fragment thereof comprises the VH sequence SEQ ID NO: 97, including one or more post-translational modifications of that sequence. In a particular embodiment, the VH comprises one, two or three CDRs selected from: a. CDR-H1, comprising the amino acid sequence SEQ ID NO: 639, b. CDR-H2, comprising the amino acid sequence SEQ ID NO: 1181, and c. CDR-H3, comprising the amino acid sequence SEQ ID NO: 1723.

[1608] In one aspect, an antibody or antigen-binding fragment thereof is provided, wherein the antibody or antigen-binding fragment thereof comprises a light chain variable domain (VL) having at least 90%, 91%, 92%, 93%, 94%, 95%, 96%, 97%, 98%, 99%, or 100% sequence identity to the amino acid sequence SEQ ID NO: 368. In some embodiments, a VL sequence having at least 90%, 91%, 92%, 93%, 94%, 95%, 96%, 97%, 98%, or 99% identity contains substitutions (e.g., conservative substitutions), insertions, or deletions relative to the reference sequence, but an antibody or antigen-binding fragment thereof comprising that sequence retains the ability to bind to same antigen as the parent (e.g., cancer associated antigen). In some embodiments, a total of 1 to 10 amino acids have been substituted, inserted and/or deleted in the amino acid sequence SEQ ID NO: 368. In some embodiments, the substitutions, insertions, or deletions occur in regions outside the CDRs (e.g., in the FRs). Optionally, the antibody or antigen-binding fragment thereof comprises the VL sequence SEQ ID NO: 368, including one or more post-translational modifications of that sequence. In a particular embodiment, the VL comprises one, two or three CDRs selected from: a. CDR-L1, comprising the amino acid sequence SEQ ID NO: 910, b. CDR-L2, comprising the amino acid sequence SEQ ID NO: 1452, and c. CDR-L3, comprising the amino acid sequence SEQ ID NO: 1994.

[1609] In one aspect, an antibody or antigen-binding fragment thereof is provided, wherein the antibody or antigen-binding fragment thereof comprises a VH as in any of the embodiments provided above, and a VL as in any of the embodiments provided above. In some embodiments, the antibody or antigen-binding fragment thereof comprises the VH amino acid sequence of SEQ ID NO: 97, and the VL amino acid sequence of SEQ ID NO: 368, optionally including post-translational modifications of those sequences.

### THNS1003

[1610] In one aspect, the present disclosure provides an antibody or antigen-binding fragment thereof comprising at least one or both variable regions selected from: a. VH comprising the amino acid sequence of SEQ ID NO: 98 and b. VL comprising the amino acid sequence of SEQ ID NO: 369.

[1611] In one aspect, the present disclosure provides an antibody or antigen-binding fragment thereof comprising at least one, two, three, four, five, or six CDRs selected from: a. CDR-H1 comprising the amino acid sequence of SEQ ID NO: 640, b. CDR-H2 comprising the amino acid sequence of SEQ ID NO: 1182, c. CDR-H3 comprising the amino acid sequence of SEQ ID NO: 1724, d. CDR-L1 comprising the amino acid sequence of SEQ ID NO: 911, e. CDR-L2 comprising the amino acid sequence of SEQ ID NO: 1453, and f. CDR-L3 comprising the amino acid sequence of SEQ ID NO: 1995.

[1612] In one aspect, the present disclosure provides an antibody or antigen-binding fragment thereof comprising a CDR-H3 comprising the amino acid sequence of SEQ ID NO: 1724, and a CDR-L3 comprising the amino acid sequence of SEQ ID NO: 1995.

[1613] In one aspect, the present disclosure provides an antibody or antigen-binding fragment thereof comprising at least one, at least two, or all three VH CDR sequences selected from: a. CDR-H1 comprising the amino acid sequence of SEQ ID NO: 640, b. CDR-H2 comprising the amino acid sequence of SEQ ID NO: 1182, c. CDR-H3 comprising the amino acid sequence of SEQ ID NO: 1724, and a VL comprising the amino acid sequence of SEQ ID NO: 369.

[1614] In one aspect, the present disclosure provides an antibody or antigen-binding fragment thereof comprising at least one, at least two, or all three VL CDR sequences selected from: a. CDR-L1 comprising the amino acid sequence of SEQ ID NO: 911, b. CDR-L2 comprising the amino acid sequence of SEQ ID NO: 1453, c. CDR-L3 comprising the amino acid sequence of SEQ ID NO: 1995, and a VH comprising the amino acid sequence of SEQ ID NO: 98.

[1615] In one aspect, an antibody or antigen-binding fragment thereof is provided, wherein the antibody or antigen-binding fragment thereof comprises a heavy chain variable domain (VH) having at least 90%, 91%, 92%, 93%, 94%, 95%, 96%, 97%, 98%, 99%, or 100% sequence identity to the amino acid sequence SEQ ID NO: 98. In some embodiments, a VH sequence having at least 90%, 91%, 92%, 93%, 94%, 95%, 96%, 97%, 98%, or 99% identity contains substitutions (e.g., conservative substitutions), insertions, or deletions relative to the reference sequence, but an antibody or antigen-binding fragment thereof comprising that sequence retains the ability to bind to same antigen as of the parent (e.g., cancer associated antigen). In some embodiments, a total of 1 to 10 amino acids have been substituted, inserted and/or deleted in the amino acid sequence SEQ ID NO: 98. In some embodiments, substitutions, insertions, or deletions occur in regions outside the CDRs (e.g., in the FRs). Optionally, the antibody or antigen-binding fragment thereof comprises the VH sequence SEQ ID NO: 98, including one or more post-translational modifications of that sequence. In a particular embodiment, the VH comprises one, two or three CDRs selected from: a. CDR-H1, comprising the amino acid sequence SEQ ID NO: 640, b. CDR-H2, comprising the amino acid sequence SEQ ID NO: 1182, and c. CDR-H3, comprising the amino acid sequence SEQ ID NO: 1724.

[1616] In one aspect, an antibody or antigen-binding fragment thereof is provided, wherein the antibody or antigen-binding fragment thereof comprises a light chain variable domain (VL) having at least 90%, 91%, 92%, 93%, 94%, 95%, 96%, 97%, 98%, 99%, or 100% sequence identity to the amino acid sequence SEQ ID NO: 369. In some embodiments, a VL sequence having at least 90%, 91%, 92%, 93%, 94%, 95%, 96%, 97%, 98%, or 99% identity contains substitutions (e.g., conservative substitutions), insertions, or deletions relative to the reference sequence, but an antibody or antigen-binding fragment thereof comprising that sequence retains the ability to bind to same antigen as the parent (e.g., cancer associated antigen). In some embodiments, a total of 1 to 10 amino acids have been substituted, inserted and/or deleted in the amino acid sequence SEQ ID NO: 369. In some embodiments, the substitutions, insertions, or deletions occur in regions outside the CDRs (e.g., in the FRs). Optionally, the antibody or antigen-binding fragment thereof comprises the VL sequence SEQ ID NO: 369, including one or more post-translational modifications of that sequence. In a particular embodiment, the VL comprises one, two or three CDRs selected from: a. CDR-L1, comprising the amino acid sequence SEQ ID NO: 911, b. CDR-L2, comprising the amino acid sequence SEQ ID NO: 1453, and c. CDR-L3, comprising the amino acid sequence SEQ ID NO: 1995.

[1617] In one aspect, an antibody or antigen-binding fragment thereof is provided, wherein the antibody or antigen-binding fragment thereof comprises a VH as in any of the embodiments provided above, and a VL as in any of the embodiments provided above. In some embodiments, the antibody or antigen-binding fragment thereof comprises the VH amino acid sequence of SEQ ID NO: 98, and the VL amino acid sequence of SEQ ID NO: 369, optionally including post-translational modifications of those sequences.

### THNS1004

[1618] In one aspect, the present disclosure provides an antibody or antigen-binding fragment thereof comprising at least one or both variable regions selected from: a. VH comprising the amino acid sequence of SEQ ID NO: 99 and b. VL comprising the amino acid sequence of SEQ ID NO: 370.

[1619] In one aspect, the present disclosure provides an antibody or antigen-binding fragment thereof comprising at least one, two, three, four, five, or six CDRs selected from: a. CDR-H1 comprising the amino acid sequence of SEQ ID NO: 641, b. CDR-H2 comprising the amino acid sequence of SEQ ID NO: 1183, c. CDR-H3 comprising the amino acid sequence of SEQ ID NO: 1725, d. CDR-L1 comprising the amino acid sequence of SEQ ID NO: 912, e. CDR-L2 comprising the amino acid sequence of SEQ ID NO: 1454, and f. CDR-L3 comprising the amino acid sequence of SEQ ID NO: 1996.

[1620] In one aspect, the present disclosure provides an antibody or antigen-binding fragment thereof comprising a CDR-H3 comprising the amino acid sequence of SEQ ID NO: 1725, and a CDR-L3 comprising the amino acid sequence of SEQ ID NO: 1996.

[1621] In one aspect, the present disclosure provides an antibody or antigen-binding fragment thereof comprising at least one, at least two, or all three VH CDR sequences selected from: a. CDR-H1 comprising the amino acid sequence of SEQ ID NO: 641, b. CDR-H2 comprising the amino acid sequence of SEQ ID NO: 1183, c. CDR-H3 comprising the amino acid sequence of SEQ ID NO: 1725, and a VL comprising the amino acid sequence of SEQ ID NO: 370.

[1622] In one aspect, the present disclosure provides an antibody or antigen-binding fragment thereof comprising at least one, at least two, or all three VL CDR sequences selected from: a. CDR-L1 comprising the amino acid sequence of SEQ ID NO: 912, b. CDR-L2 comprising the amino acid sequence of SEQ ID NO: 1454, c. CDR-L3 comprising the amino acid sequence of SEQ ID NO: 1996, and a VH comprising the amino acid sequence of SEQ ID NO: 99.

[1623] In one aspect, an antibody or antigen-binding fragment thereof is provided, wherein the antibody or antigen-binding fragment thereof comprises a heavy chain variable domain (VH) having at least 90%, 91%, 92%, 93%, 94%, 95%, 96%, 97%, 98%, 99%, or 100% sequence identity to the amino acid sequence SEQ ID NO: 99. In some embodiments, a VH sequence having at least 90%, 91%, 92%, 93%, 94%, 95%, 96%, 97%, 98%, or 99% identity contains substitutions (e.g., conservative substitutions), insertions, or deletions relative to the reference sequence, but an antibody or antigen-binding fragment thereof comprising that sequence retains the ability to bind to same antigen as of the parent (e.g., cancer associated antigen). In some embodiments, a total of 1 to 10 amino acids have been substituted, inserted and/or deleted in the amino acid sequence SEQ ID NO: 99. In some embodiments, substitutions, insertions, or deletions occur in regions outside the CDRs (e.g., in the FRs). Optionally, the antibody or antigen-binding fragment thereof comprises the VH sequence SEQ ID NO: 99, including one or more post-translational modifications of that sequence. In a particular embodiment, the VH comprises one, two or three CDRs selected from: a. CDR-H1, comprising the amino acid sequence SEQ ID NO: 641, b. CDR-H2, comprising the amino acid sequence SEQ ID NO: 1183, and c. CDR-H3, comprising the amino acid sequence SEQ ID NO: 1725.

[1624] In one aspect, an antibody or antigen-binding fragment thereof is provided, wherein the antibody or antigen-binding fragment thereof comprises a light chain variable domain (VL) having at least 90%, 91%, 92%, 93%, 94%, 95%, 96%, 97%, 98%, 99%, or 100% sequence identity to the amino acid sequence SEQ ID NO: 370. In some embodiments, a VL sequence having at least 90%, 91%, 92%, 93%, 94%, 95%, 96%, 97%, 98%, or 99% identity contains substitutions (e.g., conservative substitutions), insertions, or deletions relative to the reference sequence, but an antibody or antigen-binding fragment thereof comprising that sequence retains the ability to bind to same antigen as the parent (e.g., cancer associated antigen). In some embodiments, a total of 1 to 10 amino acids have been substituted, inserted and/or deleted in the amino acid sequence SEQ ID NO: 370. In some embodiments, the substitutions, insertions, or deletions occur in regions outside the CDRs (e.g., in the FRs). Optionally, the antibody or antigen-binding fragment thereof comprises the VL sequence SEQ ID NO: 370, including one or more post-translational modifications of that sequence. In a particular embodiment, the VL comprises one, two or three CDRs selected from: a. CDR-L1, comprising the amino acid sequence SEQ ID NO: 912, b. CDR-L2, comprising the amino acid sequence SEQ ID NO: 1454, and c. CDR-L3, comprising the amino acid sequence SEQ ID NO: 1996.

[1625] In one aspect, an antibody or antigen-binding fragment thereof is provided, wherein the antibody or antigen-binding fragment thereof comprises a VH as in any of the embodiments provided above, and a VL as in any of the embodiments provided above. In some embodiments, the antibody or antigen-binding fragment thereof comprises the VH amino acid sequence of SEQ ID NO: 99, and the VL amino acid sequence of SEQ ID NO: 370, optionally including post-translational modifications of those sequences.

### THNS1005

[1626] In one aspect, the present disclosure provides an antibody or antigen-binding fragment thereof comprising at least one or both variable regions selected from: a. VH comprising the amino acid sequence of SEQ ID NO: 100 and b. VL comprising the amino acid sequence of SEQ ID NO: 371.

[1627] In one aspect, the present disclosure provides an antibody or antigen-binding fragment thereof comprising at least one, two, three, four, five, or six CDRs selected from: a. CDR-H1 comprising the amino acid sequence of SEQ ID NO: 642, b. CDR-H2 comprising the amino acid sequence of SEQ ID NO: 1184, c. CDR-H3 comprising the amino acid sequence of SEQ ID NO: 1726, d. CDR-L1 comprising the amino acid sequence of SEQ ID NO: 913, e. CDR-L2 comprising the amino acid sequence of SEQ ID NO: 1455, and f. CDR-L3 comprising the amino acid sequence of SEQ ID NO: 1997.

[1628] In one aspect, the present disclosure provides an antibody or antigen-binding fragment thereof comprising a CDR-H3 comprising the amino acid sequence of SEQ ID NO: 1726, and a CDR-L3 comprising the amino acid sequence of SEQ ID NO: 1997.

[1629] In one aspect, the present disclosure provides an antibody or antigen-binding fragment thereof comprising at least one, at least two, or all three VH CDR sequences selected from: a. CDR-H1 comprising the amino acid sequence of SEQ ID NO: 642, b. CDR-H2 comprising the amino acid sequence of SEQ ID NO: 1184, c. CDR-H3 comprising the amino acid sequence of SEQ ID NO: 1726, and a VL comprising the amino acid sequence of SEQ ID NO: 371.

[1630] In one aspect, the present disclosure provides an antibody or antigen-binding fragment thereof comprising at least one, at least two, or all three VL CDR sequences selected from: a. CDR-L1 comprising the amino acid sequence of SEQ ID NO: 913, b. CDR-L2 comprising the amino acid sequence of SEQ ID NO: 1455, c. CDR-L3 comprising the amino acid sequence of SEQ ID NO: 1997, and a VH comprising the amino acid sequence of SEQ ID NO: 100.

[1631] In one aspect, an antibody or antigen-binding fragment thereof is provided, wherein the antibody or antigen-binding fragment thereof comprises a heavy chain variable domain (VH) having at least 90%, 91%, 92%, 93%, 94%, 95%, 96%, 97%, 98%, 99%, or 100% sequence identity to the amino acid sequence SEQ ID NO: 100. In some embodiments, a VH sequence having at least 90%, 91%, 92%, 93%, 94%, 95%, 96%, 97%, 98%, or 99% identity contains substitutions (e.g., conservative substitutions), thereof comprising that sequence retains the ability to bind to same antigen as of the parent (e.g., cancer associated antigen). In some embodiments, a total of 1 to 10 amino acids have been substituted, inserted and/or deleted in the amino acid sequence SEQ ID NO: 100. In some embodiments, substitutions, insertions, or deletions occur in regions outside the CDRs (e.g., in the FRs). Optionally, the antibody or antigen-binding fragment thereof comprises the VH sequence SEQ ID NO: 100, including one or more post-translational modifications of that sequence. In a particular embodiment, the VH comprises one, two or three CDRs selected from: a. CDR-H1, comprising the amino acid sequence SEQ ID NO: 642, b. CDR-H2, comprising the amino acid sequence SEQ ID NO: 1184, and c. CDR-H3, comprising the amino acid sequence SEQ ID NO: 1726.

[1632] In one aspect, an antibody or antigen-binding fragment thereof is provided, wherein the antibody or antigen-binding fragment thereof comprises a light chain variable domain (VL) having at least 90%, 91%, 92%, 93%, 94%, 95%, 96%, 97%, 98%, 99%, or 100% sequence identity to the amino acid sequence SEQ ID NO: 371. In some embodiments, a VL sequence having at least 90%, 91%, 92%, 93%, 94%, 95%, 96%, 97%, 98%, or 99% identity contains substitutions (e.g., conservative substitutions), insertions, or deletions relative to the reference sequence, but an antibody or antigen-binding fragment thereof comprising that sequence retains the ability to bind to same antigen as the parent (e.g., cancer associated antigen). In some embodiments, a total of 1 to 10 amino acids have been substituted, inserted and/or deleted in the amino acid sequence SEQ ID NO: 371. In some embodiments, the substitutions, insertions, or deletions occur in regions outside the CDRs (e.g., in the FRs). Optionally, the antibody or antigen-binding fragment thereof comprises the VL sequence SEQ ID NO: 371, including one or more post-translational modifications of that sequence. In a particular embodiment, the VL comprises one, two or three CDRs selected from: a. CDR-L1, comprising the amino acid sequence SEQ ID NO: 913, b. CDR-L2, comprising the amino acid sequence SEQ ID NO: 1455, and c. CDR-L3, comprising the amino acid sequence SEQ ID NO: 1997.

[1633] In one aspect, an antibody or antigen-binding fragment thereof is provided, wherein the antibody or antigen-binding fragment thereof comprises a VH as in any of the embodiments provided above, and a VL as in any of the embodiments provided above. In some embodiments, the antibody or antigen-binding fragment thereof comprises the VH amino acid sequence of SEQ ID NO: 100, and the VL amino acid sequence of SEQ ID NO: 371, optionally including post-translational modifications of those sequences.

### THNS1006

[1634] In one aspect, the present disclosure provides an antibody or antigen-binding fragment thereof comprising at least one or both variable regions selected from: a. VH comprising the amino acid sequence of SEQ ID NO: 101 and b. VL comprising the amino acid sequence of SEQ ID NO: 372.

[1635] In one aspect, the present disclosure provides an antibody or antigen-binding fragment thereof comprising at least one, two, three, four, five, or six CDRs selected from: a. CDR-H1 comprising the amino acid sequence of SEQ ID NO: 643, b. CDR-H2 comprising the amino acid sequence of SEQ ID NO: 1185, c. CDR-H3 comprising the amino acid sequence of SEQ ID NO: 1727, d. CDR-L1 comprising the amino acid sequence of SEQ ID NO: 914, e. CDR-L2 comprising the amino acid sequence of SEQ ID NO: 1456, and f. CDR-L3 comprising the amino acid sequence of SEQ ID NO: 1998.

[1636] In one aspect, the present disclosure provides an antibody or antigen-binding fragment thereof comprising a CDR-H3 comprising the amino acid sequence of SEQ ID NO: 1727, and a CDR-L3 comprising the amino acid sequence of SEQ ID NO: 1998.

[1637] In one aspect, the present disclosure provides an antibody or antigen-binding fragment thereof comprising at least one, at least two, or all three VH CDR sequences selected from: a. CDR-H1 comprising the amino acid sequence of SEQ ID NO: 643, b. CDR-H2 comprising the amino acid sequence of SEQ ID NO: 1185, c. CDR-H3 comprising the amino acid sequence of SEQ ID NO: 1727, and a VL comprising the amino acid sequence of SEQ ID NO: 372.

[1638] In one aspect, the present disclosure provides an antibody or antigen-binding fragment thereof comprising at least one, at least two, or all three VL CDR sequences selected from: a. CDR-L1 comprising the amino acid sequence of SEQ ID NO: 914, b. CDR-L2 comprising the amino acid sequence of SEQ ID NO: 1456, c. CDR-L3 comprising the amino acid sequence of SEQ ID NO: 1998, and a VH comprising the amino acid sequence of SEQ ID NO: 101.

[1639] In one aspect, an antibody or antigen-binding fragment thereof is provided, wherein the antibody or antigen-binding fragment thereof comprises a heavy chain variable domain (VH) having at least 90%, 91%, 92%, 93%, 94%, 95%, 96%, 97%, 98%, 99%, or 100% sequence identity to the amino acid sequence SEQ ID NO: 101. In some embodiments, a VH sequence having at least 90%, 91%, 92%, 93%, 94%, 95%, 96%, 97%, 98%, or 99% identity contains substitutions (e.g., conservative substitutions), insertions, or deletions relative to the reference sequence, but an antibody or antigen-binding fragment thereof comprising that sequence retains the ability to bind to same antigen as of the parent (e.g., cancer associated antigen). In some embodiments, a total of 1 to 10 amino acids have been substituted, inserted and/or deleted in the amino acid sequence SEQ ID NO: 101. In some embodiments, substitutions, insertions, or deletions occur in regions outside the CDRs (e.g., in the FRs). Optionally, the antibody or antigen-binding fragment thereof comprises the VH sequence SEQ ID NO: 101, including one or more post-translational modifications of that sequence. In a particular embodiment, the VH comprises one, two or three CDRs selected from: a. CDR-H1, comprising the amino acid sequence SEQ ID NO: 643, b. CDR-H2, comprising the amino acid sequence SEQ ID NO: 1185, and a CDR-H3, comprising the amino acid sequence SEQ ID NO: 1727.

[1640] In one aspect, an antibody or antigen-binding fragment thereof is provided, wherein the antibody or antigen-binding fragment thereof comprises a light chain variable domain (VL) having at least 90%, 91%, 92%, 93%, 94%, 95%, 96%, 97%, 98%, 99%, or 100% sequence identity to the amino acid sequence SEQ ID NO: 372. In some embodiments, a VL sequence having at least 90%, 91%, 92%, 93%, 94%, 95%, 96%, 97%, 98%, or 99% identity contains substitutions (e.g., conservative substitutions), insertions, or deletions relative to the reference sequence, but an antibody or antigen-binding fragment thereof comprising that sequence retains the ability to bind to same antigen as the parent (e.g., cancer associated antigen). In some embodiments, a total of 1 to 10 amino acids have been substituted, inserted and/or deleted in the amino acid sequence SEQ ID NO: 372. In some embodiments, the substitutions, insertions, or deletions occur in regions outside the CDRs (e.g., in the FRs). Optionally, the antibody or antigen-binding fragment thereof comprises the VL sequence SEQ ID NO: 372, including one or more post-translational modifications of that sequence. In a particular embodiment, the VL comprises one, two or three CDRs selected from: a. CDR-L1, comprising the amino acid sequence SEQ ID NO: 914, b. CDR-L2, comprising the amino acid sequence SEQ ID NO: 1456, and c. CDR-L3, comprising the amino acid sequence SEQ ID NO: 1998.

[1641] In one aspect, an antibody or antigen-binding fragment thereof is provided, wherein the antibody or antigen-binding fragment thereof comprises a VH as in any of the embodiments provided above, and a VL as in any of the embodiments provided above. In some embodiments, the antibody or antigen-binding fragment thereof comprises the VH amino acid sequence of SEQ ID NO: 101, and the VL amino acid sequence of SEQ ID NO: 372, optionally including post-translational modifications of those sequences.

### THNS1007

[1642] In one aspect, the present disclosure provides an antibody or antigen-binding fragment thereof comprising at least one or both variable regions selected from: a. VH comprising the amino acid sequence of SEQ ID NO: 102 and b. VL comprising the amino acid sequence of SEQ ID NO: 373.

[1643] In one aspect, the present disclosure provides an antibody or antigen-binding fragment thereof comprising at least one, two, three, four, five, or six CDRs selected from: a. CDR-H1 comprising the amino acid sequence of SEQ ID NO: 644, b. CDR-H2 comprising the amino acid sequence of SEQ ID NO: 1186, c. CDR-H3 comprising the amino acid sequence of SEQ ID NO: 1728, d. CDR-L1 comprising the amino acid sequence of SEQ ID NO: 915, e. CDR-L2 comprising the amino acid sequence of SEQ ID NO: 1457, and f. CDR-L3 comprising the amino acid sequence of SEQ ID NO: 1999.

[1644] In one aspect, the present disclosure provides an antibody or antigen-binding fragment thereof comprising a CDR-H3 comprising the amino acid sequence of SEQ ID NO: 1728, and a CDR-L3 comprising the amino acid sequence of SEQ ID NO: 1999.

[1645] In one aspect, the present disclosure provides an antibody or antigen-binding fragment thereof comprising at least one, at least two, or all three VH CDR sequences selected from: a. CDR-H1 comprising the amino acid sequence of SEQ ID NO: 644, b. CDR-H2 comprising the amino acid sequence of SEQ ID NO: 1186, c. CDR-H3 comprising the amino acid sequence of SEQ ID NO: 1728, and a VL comprising the amino acid sequence of SEQ ID NO: 373.

[1646] In one aspect, the present disclosure provides an antibody or antigen-binding fragment thereof comprising at least one, at least two, or all three VL CDR sequences selected from: a. CDR-L1 comprising the amino acid sequence of SEQ ID NO: 915, b. CDR-L2 comprising the amino acid sequence of SEQ ID NO: 1457, c. CDR-L3 comprising the amino acid sequence of SEQ ID NO: 1999, and a VH comprising the amino acid sequence of SEQ ID NO: 102.

[1647] In one aspect, an antibody or antigen-binding fragment thereof is provided, wherein the antibody or antigen-binding fragment thereof comprises a heavy chain variable domain (VH) having at least 90%, 91%, 92%, 93%, 94%, 95%, 96%, 97%, 98%, 99%, or 100% sequence identity to the amino acid sequence SEQ ID NO: 102. In some embodiments, a VH sequence having at least 90%, 91%, 92%, 93%, 94%, 95%, 96%, 97%, 98%, or 99% identity contains substitutions (e.g., conservative substitutions), insertions, or deletions relative to the reference sequence, but an antibody or antigen-binding fragment thereof comprising that sequence retains the ability to bind to same antigen as of the parent (e.g., cancer associated antigen). In some embodiments, a total of 1 to 10 amino acids have been substituted, inserted and/or deleted in the amino acid sequence SEQ ID NO: 102. In some embodiments, substitutions, insertions, or deletions occur in regions outside the CDRs (e.g., in the FRs). Optionally, the antibody or antigen-binding fragment thereof comprises the VH sequence SEQ ID NO: 102, including one or more post-translational modifications of that sequence. In a particular embodiment, the VH comprises one, two or three CDRs selected from: a. CDR-H1, comprising the amino acid sequence SEQ ID NO: 644, b. CDR-H2, comprising the amino acid sequence SEQ ID NO: 1186, and c. CDR-H3, comprising the amino acid sequence SEQ ID NO: 1728.

[1648] In one aspect, an antibody or antigen-binding fragment thereof is provided, wherein the antibody or antigen-binding fragment thereof comprises a light chain variable domain (VL) having at least 90%, 91%, 92%, 93%, 94%, 95%, 96%, 97%, 98%, 99%, or 100% sequence identity to the amino acid sequence SEQ ID NO: 373. In some embodiments, a VL sequence having at least 90%, 91%, 92%, 93%, 94%, 95%, 96%, 97%, 98%, or 99% identity contains substitutions (e.g., conservative substitutions), insertions, or deletions relative to the reference sequence, but an antibody or antigen-binding fragment thereof comprising that sequence retains the ability to bind to same antigen as the parent (e.g., cancer associated antigen). In some embodiments, a total of 1 to 10 amino acids have been substituted, inserted and/or deleted in the amino acid sequence SEQ ID NO: 373. In some embodiments, the substitutions, insertions, or deletions occur in regions outside the CDRs (e.g., in the FRs). Optionally, the antibody or antigen-binding fragment thereof comprises the VL sequence SEQ ID NO: 373, including one or more post-translational modifications of that sequence. In a particular embodiment, the VL comprises one, two or three CDRs selected from: a. CDR-L1, comprising the amino acid sequence SEQ ID NO: 915, b. CDR-L2, comprising the amino acid sequence SEQ ID NO: 1457, and c. CDR-L3, comprising the amino acid sequence SEQ ID NO: 1999.

[1649] In one aspect, an antibody or antigen-binding fragment thereof is provided, wherein the antibody or antigen-binding fragment thereof comprises a VH as in any of the embodiments provided above, and a VL as in any of the embodiments provided above. In some embodiments, the antibody or antigen-binding fragment thereof comprises the VH amino acid sequence of SEQ ID NO: 102, and the VL amino acid sequence of SEQ ID NO: 373, optionally including post-translational modifications of those sequences.

### THNS1008

[1650] In one aspect, the present disclosure provides an antibody or antigen-binding fragment thereof comprising at least one or both variable regions selected from: a. VH comprising the amino acid sequence of SEQ ID NO: 103 and b. VL comprising the amino acid sequence of SEQ ID NO: 374.

[1651] In one aspect, the present disclosure provides an antibody or antigen-binding fragment thereof comprising at least one, two, three, four, five, or six CDRs selected from: a. CDR-H1 comprising the amino acid sequence of SEQ ID NO: 645, b. CDR-H2 comprising the amino acid sequence of SEQ ID NO: 1187, c. CDR-H3 comprising the amino acid sequence of SEQ ID NO: 1729, d. CDR-L1 comprising the amino acid sequence of SEQ ID NO: 916, e. CDR-L2 comprising the amino acid sequence of SEQ ID NO: 1458, and f. CDR-L3 comprising the amino acid sequence of SEQ ID NO: 2000.

[1652] In one aspect, the present disclosure provides an antibody or antigen-binding fragment thereof comprising at least one, two, three, four, five, or six CDRs selected from: a. CDR-H1 comprising a CDR-H3 comprising the amino acid sequence of SEQ ID NO: 1729, and a CDR-L3 comprising the amino acid sequence of SEQ ID NO: 2000.

[1653] In one aspect, the present disclosure provides an antibody or antigen-binding fragment thereof comprising at least one, at least two, or all three VH CDR sequences selected from: a. CDR-H1 comprising the amino acid sequence of SEQ ID NO: 645, b. CDR-H2 comprising the amino acid sequence of SEQ ID NO: 1187, c. CDR-H3 comprising the amino acid sequence of SEQ ID NO: 1729, and a VL comprising the amino acid sequence of SEQ ID NO: 374.

[1654] In one aspect, the present disclosure provides an antibody or antigen-binding fragment thereof comprising at least one, at least two, or all three VL CDR sequences selected from: a. CDR-L1 comprising the amino acid sequence of SEQ ID NO: 916, b. CDR-L2 comprising the amino acid sequence of SEQ ID NO: 1458, c. CDR-L3 comprising the amino acid sequence of SEQ ID NO: 2000, and a VH comprising the amino acid sequence of SEQ ID NO: 103.

[1655] In one aspect, an antibody or antigen-binding fragment thereof is provided, wherein the antibody or antigen-binding fragment thereof comprises a heavy chain variable domain (VH) having at least 90%, 91%, 92%, 93%, 94%, 95%, 96%, 97%, 98%, 99%, or 100% sequence identity to the amino acid sequence SEQ ID NO: 103. In some embodiments, a VH sequence having at least 90%, 91%, 92%, 93%, 94%, 95%, 96%, 97%, 98%, or 99% identity contains substitutions (e.g., conservative substitutions), insertions, or deletions relative to the reference sequence, but an antibody or antigen-binding fragment thereof comprising that sequence retains the ability to bind to same antigen as of the parent (e.g., cancer associated antigen). In some embodiments, a total of 1 to 10 amino acids have been substituted, inserted and/or deleted in the amino acid sequence SEQ ID NO: 103. In some embodiments, substitutions, insertions, or deletions occur in regions outside the CDRs (e.g., in the FRs). Optionally, the antibody or antigen-binding fragment thereof comprises the VH sequence SEQ ID NO: 103, including one or more post-translational modifications of that sequence. In a particular embodiment, the VH comprises one, two or three CDRs selected from: a. CDR-H1, comprising the amino acid sequence SEQ ID NO: 645, b. CDR-H2, comprising the amino acid sequence SEQ ID NO: 1187, and c. CDR-H3, comprising the amino acid sequence SEQ ID NO: 1729.

[1656] In one aspect, an antibody or antigen-binding fragment thereof is provided, wherein the antibody or antigen-binding fragment thereof comprises a light chain variable domain (VL) having at least 90%, 91%, 92%, 93%, 94%, 95%, 96%, 97%, 98%, 99%, or 100% sequence identity to the amino acid sequence SEQ ID NO: 374. In some embodiments, a VL sequence having at least 90%, 91%, 92%, 93%, 94%, 95%, 96%, 97%, 98%, or 99% identity contains substitutions (e.g., conservative substitutions), insertions, or deletions relative to the reference sequence, but an antibody or antigen-binding fragment thereof comprising that sequence retains the ability to bind to same antigen as the parent (e.g., cancer associated antigen). In some embodiments, a total of 1 to 10 amino acids have been substituted, inserted and/or deleted in the amino acid sequence SEQ ID NO: 374. In some embodiments, the substitutions, insertions, or deletions occur in regions outside the CDRs (e.g., in the FRs). Optionally, the antibody or antigen-binding fragment thereof comprises the VL sequence SEQ ID NO: 374, including one or more post-translational modifications of that sequence. In a particular embodiment, the VL comprises one, two or three CDRs selected from: a. CDR-L1, comprising the amino acid sequence SEQ ID NO: 916, b. CDR-L2, comprising the amino acid sequence SEQ ID NO: 1458, and c. CDR-L3, comprising the amino acid sequence SEQ ID NO: 2000.

[1657] In one aspect, an antibody or antigen-binding fragment thereof is provided, wherein the antibody or antigen-binding fragment thereof comprises a VH as in any of the embodiments provided above, and a VL as in any of the embodiments provided above. In some embodiments, the antibody or antigen-binding fragment thereof comprises the VH amino acid sequence of SEQ ID NO: 103, and the VL amino acid sequence of SEQ ID NO: 374, optionally including post-translational modifications of those sequences.

### THNS1009

[1658] In one aspect, the present disclosure provides an antibody or antigen-binding fragment thereof comprising at least one or both variable regions selected from: a. VH comprising the amino acid sequence of SEQ ID NO: 104 and b. VL comprising the amino acid sequence of SEQ ID NO: 375.

[1659] In one aspect, the present disclosure provides an antibody or antigen-binding fragment thereof comprising at least one, two, three, four, five, or six CDRs selected from: a. CDR-H1 comprising the amino acid sequence of SEQ ID NO: 646, b. CDR-H2 comprising the amino acid sequence of SEQ ID NO: 1188, c. CDR-H3 comprising the amino acid sequence of SEQ ID NO: 1730, d. CDR-L1 comprising the amino acid sequence of SEQ ID NO: 917, e. CDR-L2 comprising the amino acid sequence of SEQ ID NO: 1459, and f. CDR-L3 comprising the amino acid sequence of SEQ ID NO: 2001.

[1660] In one aspect, the present disclosure provides an antibody or antigen-binding fragment thereof comprising a CDR-H3 comprising the amino acid sequence of SEQ ID NO: 1730, and a CDR-L3 comprising the amino acid sequence of SEQ ID NO: 2001.

[1661] In one aspect, the present disclosure provides an antibody or antigen-binding fragment thereof comprising at least one, at least two, or all three VH CDR sequences selected from: a. CDR-H1 comprising the amino acid sequence of SEQ ID NO: 646, b. CDR-H2 comprising the amino acid sequence of SEQ ID NO: 1188, c. CDR-H3 comprising the amino acid sequence of SEQ ID NO: 1730, and a VL comprising the amino acid sequence of SEQ ID NO: 375.

[1662] In one aspect, the present disclosure provides an antibody or antigen-binding fragment thereof comprising at least one, at least two, or all three VL CDR sequences selected from: a. CDR-L1 comprising the amino acid sequence of SEQ ID NO: 917, b. CDR-L2 comprising the amino acid sequence of SEQ ID NO: 1459, c. CDR-L3 comprising the amino acid sequence of SEQ ID NO: 2001, and a VH comprising the amino acid sequence of SEQ ID NO: 104.

[1663] In one aspect, an antibody or antigen-binding fragment thereof is provided, wherein the antibody or antigen-binding fragment thereof comprises a heavy chain variable domain (VH) having at least 90%, 91%, 92%, 93%, 94%, 95%, 96%, 97%, 98%, 99%, or 100% sequence identity to the amino acid sequence SEQ ID NO: 104. In some embodiments, a VH sequence having at least 90%, 91%, 92%, 93%, 94%, 95%, 96%, 97%, 98%, or 99% identity contains substitutions (e.g., conservative substitutions), insertions, or deletions relative to the reference sequence, but an antibody or antigen-binding fragment thereof comprising that sequence retains the ability to bind to same antigen as of the parent (e.g., cancer associated antigen). In some embodiments, a total of 1 to 10 amino acids have been substituted, inserted and/or deleted in the amino acid sequence SEQ ID NO: 104. In some embodiments, substitutions, insertions, or deletions occur in regions outside the CDRs (e.g., in the FRs). Optionally, the antibody or antigen-binding fragment thereof comprises the VH sequence SEQ ID NO: 104, including one or more post-translational modifications of that sequence. In a particular embodiment, the VH comprises one, two or three CDRs selected from: a. CDR-H1, comprising the amino acid sequence SEQ ID NO: 646, b. CDR-H2, comprising the amino acid sequence SEQ ID NO: 1188, and c. CDR-H3, comprising the amino acid sequence SEQ ID NO: 1730.

[1664] In one aspect, an antibody or antigen-binding fragment thereof is provided, wherein the antibody or antigen-binding fragment thereof comprises a light chain variable domain (VL) having at least 90%, 91%, 92%, 93%, 94%, 95%, 96%, 97%, 98%, 99%, or 100% sequence identity to the amino acid sequence SEQ ID NO: 375. In some embodiments, a VL sequence having at least 90%, 91%, 92%, 93%, 94%, 95%, 96%, 97%, 98%, or 99% identity contains substitutions (e.g., conservative substitutions), insertions, or deletions relative to the reference sequence, but an antibody or antigen-binding fragment thereof comprising that sequence retains the ability to bind to same antigen as the parent (e.g., cancer associated antigen). In some embodiments, a total of 1 to 10 amino acids have been substituted, inserted and/or deleted in the amino acid sequence SEQ ID NO: 375. In some embodiments, the substitutions, insertions, or deletions occur in regions outside the CDRs (e.g., in the FRs). Optionally, the antibody or antigen-binding fragment thereof comprises the VL sequence SEQ ID NO: 375, including one or more post-translational modifications of that sequence. In a particular embodiment, the VL comprises one, two or three CDRs selected from: a. CDR-L1, comprising the amino acid sequence SEQ ID NO: 917, b. CDR-L2, comprising the amino acid sequence SEQ ID NO: 1459, and c. CDR-L3, comprising the amino acid sequence SEQ ID NO: 2001.

[1665] In one aspect, an antibody or antigen-binding fragment thereof is provided, wherein the antibody or antigen-binding fragment thereof comprises a VH as in any of the embodiments provided above, and a VL as in any of the embodiments provided above. In some embodiments, the antibody or antigen-binding fragment thereof comprises the VH amino acid sequence of SEQ ID NO: 104, and the VL amino acid sequence of SEQ ID NO: 375, optionally including post-translational modifications of those sequences.

### THNS1010

[1666] In one aspect, the present disclosure provides an antibody or antigen-binding fragment thereof comprising at least one or both variable regions selected from: a. VH comprising the amino acid sequence of SEQ ID NO: 105 and b. VL comprising the amino acid sequence of SEQ ID NO: 376.

[1667] In one aspect, the present disclosure provides an antibody or antigen-binding fragment thereof comprising at least one, two, three, four, five, or six CDRs selected from: a. CDR-H1 comprising the amino acid sequence of SEQ ID NO: 647, b. CDR-H2 comprising the amino acid sequence of SEQ ID NO: 1189, c. CDR-H3 comprising the amino acid sequence of SEQ ID NO: 1731, d. CDR-L1 comprising the amino acid sequence of SEQ ID NO: 918, e. CDR-L2 comprising the amino acid sequence of SEQ ID NO: 1460, and f. CDR-L3 comprising the amino acid sequence of SEQ ID NO: 2002.

[1668] In one aspect, the present disclosure provides an antibody or antigen-binding fragment thereof comprising a CDR-H3 comprising the amino acid sequence of SEQ ID NO: 1731, and a CDR-L3 comprising the amino acid sequence of SEQ ID NO: 2002.

[1669] In one aspect, the present disclosure provides an antibody or antigen-binding fragment thereof comprising at least one, at least two, or all three VH CDR sequences selected from: a. CDR-H1 comprising the amino acid sequence of SEQ ID NO: 647, b. CDR-H2 comprising the amino acid sequence of SEQ ID NO: 1189, c. CDR-H3 comprising the amino acid sequence of SEQ ID NO: 1731, and a VL comprising the amino acid sequence of SEQ ID NO: 376.

[1670] In one aspect, the present disclosure provides an antibody or antigen-binding fragment thereof comprising at least one, at least two, or all three VL CDR sequences selected from: a. CDR-L1 comprising the amino acid sequence of SEQ ID NO: 918, b. CDR-L2 comprising the amino acid sequence of SEQ ID NO: 1460, c. CDR-L3 comprising the amino acid sequence of SEQ ID NO: 2002, and a VH comprising the amino acid sequence of SEQ ID NO: 105.

[1671] In one aspect, an antibody or antigen-binding fragment thereof is provided, wherein the antibody or antigen-binding fragment thereof comprises a heavy chain variable domain (VH) having at least 90%, 91%, 92%, 93%, 94%, 95%, 96%, 97%, 98%, 99%, or 100% sequence identity to the amino acid sequence SEQ ID NO: 105. In some embodiments, a VH sequence having at least 90%, 91%, 92%, 93%, 94%, 95%, 96%, 97%, 98%, or 99% identity contains substitutions (e.g., conservative substitutions), insertions, or deletions relative to the reference sequence, but an antibody or antigen-binding fragment thereof comprising that sequence retains the ability to bind to same antigen as of the parent (e.g., cancer associated antigen). In some embodiments, a total of 1 to 10 amino acids have been substituted, inserted and/or deleted in the amino acid sequence SEQ ID NO: 105. In some embodiments, substitutions, insertions, or deletions occur in regions outside the CDRs (e.g., in the FRs). Optionally, the antibody or antigen-binding fragment thereof comprises the VH sequence SEQ ID NO: 105, including one or more post-translational modifications of that sequence. In a particular embodiment, the VH comprises one, two or three CDRs selected from: a. CDR-H1, comprising the amino acid sequence SEQ ID NO: 647, b. CDR-H2, comprising the amino acid sequence SEQ ID NO: 1189, and c. CDR-H3, comprising the amino acid sequence SEQ ID NO: 1731.

[1672] In one aspect, an antibody or antigen-binding fragment thereof is provided, wherein the antibody or antigen-binding fragment thereof comprises a light chain variable domain (VL) having at least 90%, 91%, 92%, 93%, 94%, 95%, 96%, 97%, 98%, 99%, or 100% sequence identity to the amino acid sequence SEQ ID NO: 376. In some embodiments, a VL sequence having at least 90%, 91%, 92%, 93%, 94%, 95%, 96%, 97%, 98%, or 99% identity contains substitutions (e.g., conservative substitutions), insertions, or deletions relative to the reference sequence, but an antibody or antigen-binding fragment thereof comprising that sequence retains the ability to bind to same antigen as the parent (e.g., cancer associated antigen). In some embodiments, a total of 1 to 10 amino acids have been substituted, inserted and/or deleted in the amino acid sequence SEQ ID NO: 376. In some embodiments, the substitutions, insertions, or deletions occur in regions outside the CDRs (e.g., in the FRs). Optionally, the antibody or antigen-binding fragment thereof comprises the VL sequence SEQ ID NO: 376, including one or more post-translational modifications of that sequence. In a particular embodiment, the VL comprises one, two or three CDRs selected from: a. CDR-L1, comprising the amino acid sequence SEQ ID NO: 918, b. CDR-L2, comprising the amino acid sequence SEQ ID NO: 1460, and c. CDR-L3, comprising the amino acid sequence SEQ ID NO: 2002.

[1673] In one aspect, an antibody or antigen-binding fragment thereof is provided, wherein the antibody or antigen-binding fragment thereof comprises a VH as in any of the embodiments provided above, and a VL as in any of the embodiments provided above. In some embodiments, the antibody or antigen-binding fragment thereof comprises the VH amino acid sequence of SEQ ID NO: 105, and the VL amino acid sequence of SEQ ID NO: 376, optionally including post-translational modifications of those sequences.

### THNS1011

[1674] In one aspect, the present disclosure provides an antibody or antigen-binding fragment thereof comprising at least one or both variable regions selected from: a. VH comprising the amino acid sequence of SEQ ID NO: 106 and b. VL comprising the amino acid sequence of SEQ ID NO: 377.

[1675] In one aspect, the present disclosure provides an antibody or antigen-binding fragment thereof comprising at least one, two, three, four, five, or six CDRs selected from: a. CDR-H1 comprising the amino acid sequence of SEQ ID NO: 648, b. CDR-H2 comprising the amino acid sequence of SEQ ID NO: 1190, c. CDR-H3 comprising the amino acid sequence of SEQ ID NO: 1732, d. CDR-L1 comprising the amino acid sequence of SEQ ID NO: 919, e. CDR-L2 comprising the amino acid sequence of SEQ ID NO: 1461, and f. CDR-L3 comprising the amino acid sequence of SEQ ID NO: 2003.

[1676] In one aspect, the present disclosure provides an antibody or antigen-binding fragment thereof comprising a CDR-H3 comprising the amino acid sequence of SEQ ID NO: 1732, and a CDR-L3 comprising the amino acid sequence of SEQ ID NO: 2003.

[1677] In one aspect, the present disclosure provides an antibody or antigen-binding fragment thereof comprising at least one, at least two, or all three VH CDR sequences selected from: a. CDR-H1 comprising the amino acid sequence of SEQ ID NO: 648, b. CDR-H2 comprising the amino acid sequence of SEQ ID NO: 1190, c. CDR-H3 comprising the amino acid sequence of SEQ ID NO: 1732, and a VL comprising the amino acid sequence of SEQ ID NO: 377.

[1678] In one aspect, the present disclosure provides an antibody or antigen-binding fragment thereof comprising at least one, at least two, or all three VL CDR sequences selected from: a. CDR-L1 comprising the amino acid sequence of SEQ ID NO: 919, b. CDR-L2 comprising the amino acid sequence of SEQ ID NO: 1461, c. CDR-L3 comprising the amino acid sequence of SEQ ID NO: 2003, and a VH comprising the amino acid sequence of SEQ ID NO: 106.

[1679] In one aspect, an antibody or antigen-binding fragment thereof is provided, wherein the antibody or antigen-binding fragment thereof comprises a heavy chain variable domain (VH) having at least 90%, 91%, 92%, 93%, 94%, 95%, 96%, 97%, 98%, 99%, or 100% sequence identity to the amino acid sequence SEQ ID NO: 106. In some embodiments, a VH sequence having at least 90%, 91%, 92%, 93%, 94%, 95%, 96%, 97%, 98%, or 99% identity contains substitutions (e.g., conservative substitutions), insertions, or deletions relative to the reference sequence, but an antibody or antigen-binding fragment thereof comprising that sequence retains the ability to bind to same antigen as of the parent (e.g., cancer associated antigen). In some embodiments, a total of 1 to 10 amino acids have been substituted, inserted and/or deleted in the amino acid sequence SEQ ID NO: 106. In some embodiments, substitutions, insertions, or deletions occur in regions outside the CDRs (e.g., in the FRs). Optionally, the antibody or antigen-binding fragment thereof comprises the VH sequence SEQ ID NO: 106, including one or more post-translational modifications of that sequence. In a particular embodiment, the VH comprises one, two or three CDRs selected from: a. CDR-H1, comprising the amino acid sequence SEQ ID NO: 648, b. CDR-H2, comprising the amino acid sequence SEQ ID NO: 1190, and c. CDR-H3, comprising the amino acid sequence SEQ ID NO: 1732.

[1680] In one aspect, an antibody or antigen-binding fragment thereof is provided, wherein the antibody or antigen-binding fragment thereof comprises a light chain variable domain (VL) having at least 90%, 91%, 92%, 93%, 94%, 95%, 96%, 97%, 98%, 99%, or 100% sequence identity to the amino acid sequence SEQ ID NO: 377. In some embodiments, a VL sequence having at least 90%, 91%, 92%, 93%, 94%, 95%, 96%, 97%, 98%, or 99% identity contains substitutions (e.g., conservative substitutions), insertions, or deletions relative to the reference sequence, but an antibody or antigen-binding fragment thereof comprising that sequence retains the ability to bind to same antigen as the parent (e.g., cancer associated antigen). In some embodiments, a total of 1 to 10 amino acids have been substituted, inserted and/or deleted in the amino acid sequence SEQ ID NO: 377. In some embodiments, the substitutions, insertions, or deletions occur in regions outside the CDRs (e.g., in the FRs). Optionally, the antibody or antigen-binding fragment thereof comprises the VL sequence SEQ ID NO: 377, including one or more post-translational modifications of that sequence. In a particular embodiment, the VL comprises one, two or three CDRs selected from: a. CDR-L1, comprising the amino acid sequence SEQ ID NO: 919, b. CDR-L2, comprising the amino acid sequence SEQ ID NO: 1461, and c. CDR-L3, comprising the amino acid sequence SEQ ID NO: 2003.

[1681] In one aspect, an antibody or antigen-binding fragment thereof is provided, wherein the antibody or antigen-binding fragment thereof comprises a VH as in any of the embodiments provided above, and a VL as in any of the embodiments provided above. In some embodiments, the antibody or antigen-binding fragment thereof comprises the VH amino acid sequence of SEQ ID NO: 106, and the VL amino acid sequence of SEQ ID NO: 377, optionally including post-translational modifications of those sequences.

### THNS1012

[1682] In one aspect, the present disclosure provides an antibody or antigen-binding fragment thereof comprising at least one or both variable regions selected from: a. VH comprising the amino acid sequence of SEQ ID NO: 107 and b. VL comprising the amino acid sequence of SEQ ID NO: 378.

[1683] In one aspect, the present disclosure provides an antibody or antigen-binding fragment thereof comprising at least one, two, three, four, five, or six CDRs selected from: a. CDR-H1 comprising the amino acid sequence of SEQ ID NO: 649, b. CDR-H2 comprising the amino acid sequence of SEQ ID NO: 1191, c. CDR-H3 comprising the amino acid sequence of SEQ ID NO: 1733, d. CDR-L1 comprising the amino acid sequence of SEQ ID NO: 920, e. CDR-L2 comprising the amino acid sequence of SEQ ID NO: 1462, f. CDR-L3 comprising the amino acid sequence of SEQ ID NO: 2004.

[1684] In one aspect, the present disclosure provides an antibody or antigen-binding fragment thereof comprising a CDR-H3 comprising the amino acid sequence of SEQ ID NO: 1733, and a CDR-L3 comprising the amino acid sequence of SEQ ID NO: 2004.

[1685] In one aspect, the present disclosure provides an antibody or antigen-binding fragment thereof comprising at least one, at least two, or all three VH CDR sequences selected from: a. CDR-H1 comprising the amino acid sequence of SEQ ID NO: 649, b. CDR-H2 comprising the amino acid sequence of SEQ ID NO: 1191, c. CDR-H3 comprising the amino acid sequence of SEQ ID NO: 1733, and a VL comprising the amino acid sequence of SEQ ID NO: 378.

[1686] In one aspect, the present disclosure provides an antibody or antigen-binding fragment thereof comprising at least one, at least two, or all three VL CDR sequences selected from: a. CDR-L1 comprising the amino acid sequence of SEQ ID NO: 920, b. CDR-L2 comprising the amino acid sequence of SEQ ID NO: 1462, c. CDR-L3 comprising the amino acid sequence of SEQ ID NO: 2004, and a VH comprising the amino acid sequence of SEQ ID NO: 107.

[1687] In one aspect, an antibody or antigen-binding fragment thereof is provided, wherein the antibody or antigen-binding fragment thereof comprises a heavy chain variable domain (VH) having at least 90%, 91%, 92%, 93%, 94%, 95%, 96%, 97%, 98%, 99%, or 100% sequence identity to the amino acid sequence SEQ ID NO: 107. In some embodiments, a VH sequence having at least 90%, 91%, 92%, 93%, 94%, 95%, 96%, 97%, 98%, or 99% identity contains substitutions (e.g., conservative substitutions), insertions, or deletions relative to the reference sequence, but an antibody or antigen-binding fragment thereof comprising that sequence retains the ability to bind to same antigen as of the parent (e.g., cancer associated antigen). In some embodiments, a total of 1 to 10 amino acids have been substituted, inserted and/or deleted in the amino acid sequence SEQ ID NO: 107. In some embodiments, substitutions, insertions, or deletions occur in regions outside the CDRs (e.g., in the FRs). Optionally, the antibody or antigen-binding fragment thereof comprises the VH sequence SEQ ID NO: 107, including one or more post-translational modifications of that sequence. In a particular embodiment, the VH comprises one, two or three CDRs selected from: a. CDR-H1, comprising the amino acid sequence SEQ ID NO: 649, b. CDR-H2, comprising the amino acid sequence SEQ ID NO: 1191, and c. CDR-H3, comprising the amino acid sequence SEQ ID NO: 1733.

[1688] In one aspect, an antibody or antigen-binding fragment thereof is provided, wherein the antibody or antigen-binding fragment thereof comprises a light chain variable domain (VL) having at least 90%, 91%, 92%, 93%, 94%, 95%, 96%, 97%, 98%, 99%, or 100% sequence identity to the amino acid sequence SEQ ID NO: 378. In some embodiments, a VL sequence having at least 90%, 91%, 92%, 93%, 94%, 95%, 96%, 97%, 98%, or 99% identity contains substitutions (e.g., conservative substitutions), insertions, or deletions relative to the reference sequence, but an antibody or antigen-binding fragment thereof comprising that sequence retains the ability to bind to same antigen as the parent (e.g., cancer associated antigen). In some embodiments, a total of 1 to 10 amino acids have been substituted, inserted and/or deleted in the amino acid sequence SEQ ID NO: 378. In some embodiments, the substitutions, insertions, or deletions occur in regions outside the CDRs (e.g., in the FRs). Optionally, the antibody or antigen-binding fragment thereof comprises the VL sequence SEQ ID NO: 378, including one or more post-translational modifications of that sequence. In a particular embodiment, the VL comprises one, two or three CDRs selected from: a. CDR-L1, comprising the amino acid sequence SEQ ID NO: 920, b. CDR-L2, comprising the amino acid sequence SEQ ID NO: 1462, and c. CDR-L3, comprising the amino acid sequence SEQ ID NO: 2004.

[1689] In one aspect, an antibody or antigen-binding fragment thereof is provided, wherein the antibody or antigen-binding fragment thereof comprises a VH as in any of the embodiments provided above, and a VL as in any of the embodiments provided above. In some embodiments, the antibody or antigen-binding fragment thereof comprises the VH amino acid sequence of SEQ ID NO: 107, and the VL amino acid sequence of SEQ ID NO: 378, optionally including post-translational modifications of those sequences.

### THNS1013

[1690] In one aspect, the present disclosure provides an antibody or antigen-binding fragment thereof comprising at least one or both variable regions selected from: a. VH comprising the amino acid sequence of SEQ ID NO: 108 and b. VL comprising the amino acid sequence of SEQ ID NO: 379.

[1691] In one aspect, the present disclosure provides an antibody or antigen-binding fragment thereof comprising at least one, two, three, four, five, or six CDRs selected from: a. CDR-H1 comprising the amino acid sequence of SEQ ID NO: 650, b. CDR-H2 comprising the amino acid sequence of SEQ ID NO: 1192, c. CDR-H3 comprising the amino acid sequence of SEQ ID NO: 1734, d. CDR-L1 comprising the amino acid sequence of SEQ ID NO: 921, e. CDR-L2 comprising the amino acid sequence of SEQ ID NO: 1463, and f. CDR-L3 comprising the amino acid sequence of SEQ ID NO: 2005.

[1692] In one aspect, the present disclosure provides an antibody or antigen-binding fragment thereof comprising a CDR-H3 comprising the amino acid sequence of SEQ ID NO: 1734, and a CDR-L3 comprising the amino acid sequence of SEQ ID NO: 2005.

[1693] In one aspect, the present disclosure provides an antibody or antigen-binding fragment thereof comprising at least one, at least two, or all three VH CDR sequences selected from: a. CDR-H1 comprising the amino acid sequence of SEQ ID NO: 650, b. CDR-H2 comprising the amino acid sequence of SEQ ID NO: 1192, c. CDR-H3 comprising the amino acid sequence of SEQ ID NO: 1734, and a VL comprising the amino acid sequence of SEQ ID NO: 379.

[1694] In one aspect, the present disclosure provides an antibody or antigen-binding fragment thereof comprising at least one, at least two, or all three VL CDR sequences selected from: a. CDR-L1 comprising the amino acid sequence of SEQ ID NO: 921, b. CDR-L2 comprising the amino acid sequence of SEQ ID NO: 1463, c. CDR-L3 comprising the amino acid sequence of SEQ ID NO: 2005, and a VH comprising the amino acid sequence of SEQ ID NO: 108.

[1695] In one aspect, an antibody or antigen-binding fragment thereof is provided, wherein the antibody or antigen-binding fragment thereof comprises a heavy chain variable domain (VH) having at least 90%, 91%, 92%, 93%, 94%, 95%, 96%, 97%, 98%, 99%, or 100% sequence identity to the amino acid sequence SEQ ID NO: 108. In some embodiments, a VH sequence having at least 90%, 91%, 92%, 93%, 94%, 95%, 96%, 97%, 98%, or 99% identity contains substitutions (e.g., conservative substitutions), insertions, or deletions relative to the reference sequence, but an antibody or antigen-binding fragment thereof comprising that sequence retains the ability to bind to same antigen as of the parent (e.g., cancer associated antigen). In some embodiments, a total of 1 to 10 amino acids have been substituted, inserted and/or deleted in the amino acid sequence SEQ ID NO: 108. In some embodiments, substitutions, insertions, or deletions occur in regions outside the CDRs (e.g., in the FRs). Optionally, the antibody or antigen-binding fragment thereof comprises the VH sequence SEQ ID NO: 108, including one or more post-translational modifications of that sequence. In a particular embodiment, the VH comprises one, two or three CDRs selected from: a. CDR-H1, comprising the amino acid sequence SEQ ID NO: 650, b. CDR-H2, comprising the amino acid sequence SEQ ID NO: 1192, and c. CDR-H3, comprising the amino acid sequence SEQ ID NO: 1734.

[1696] In one aspect, an antibody or antigen-binding fragment thereof is provided, wherein the antibody or antigen-binding fragment thereof comprises a light chain variable domain (VL) having at least 90%, 91%, 92%, 93%, 94%, 95%, 96%, 97%, 98%, 99%, or 100% sequence identity to the amino acid sequence SEQ ID NO: 379. In some embodiments, a VL sequence having at least 90%, 91%, 92%, 93%, 94%, 95%, 96%, 97%, 98%, or 99% identity contains substitutions (e.g., conservative substitutions), insertions, or deletions relative to the reference sequence, but an antibody or antigen-binding fragment thereof comprising that sequence retains the ability to bind to same antigen as the parent (e.g., cancer associated antigen). In some embodiments, a total of 1 to 10 amino acids have been substituted, inserted and/or deleted in the amino acid sequence SEQ ID NO: 379. In some embodiments, the substitutions, insertions, or deletions occur in regions outside the CDRs (e.g., in the FRs). Optionally, the antibody or antigen-binding fragment thereof comprises the VL sequence SEQ ID NO: 379, including one or more post-translational modifications of that sequence. In a particular embodiment, the VL comprises one, two or three CDRs selected from: a. CDR-L1, comprising the amino acid sequence SEQ ID NO: 921, b. CDR-L2, comprising the amino acid sequence SEQ ID NO: 1463, and c. CDR-L3, comprising the amino acid sequence SEQ ID NO: 2005.

[1697] In one aspect, an antibody or antigen-binding fragment thereof is provided, wherein the antibody or antigen-binding fragment thereof comprises a VH as in any of the embodiments provided above, and a VL as in any of the embodiments provided above. In some embodiments, the antibody or antigen-binding fragment thereof comprises the VH amino acid sequence of SEQ ID NO: 108, and the VL amino acid sequence of SEQ ID NO: 379, optionally including post-translational modifications of those sequences.

### THNS1014

[1698] In one aspect, the present disclosure provides an antibody or antigen-binding fragment thereof comprising at least one or both variable regions selected from: a. VH comprising the amino acid sequence of SEQ ID NO: 109 and b. VL comprising the amino acid sequence of SEQ ID NO: 380.

[1699] In one aspect, the present disclosure provides an antibody or antigen-binding fragment thereof comprising at least one, two, three, four, five, or six CDRs selected from: a. CDR-H1 comprising the amino acid sequence of SEQ ID NO: 651, b. CDR-H2 comprising the amino acid sequence of SEQ ID NO: 1193, c. CDR-H3 comprising the amino acid sequence of SEQ ID NO: 1735, d. CDR-L1 comprising the amino acid sequence of SEQ ID NO: 922, e. CDR-L2 comprising the amino acid sequence of SEQ ID NO: 1464, and f. CDR-L3 comprising the amino acid sequence of SEQ ID NO: 2006.

[1700] In one aspect, the present disclosure provides an antibody or antigen-binding fragment thereof comprising a CDR-H3 comprising the amino acid sequence of SEQ ID NO: 1735, and a CDR-L3 comprising the amino acid sequence of SEQ ID NO: 2006.

[1701] In one aspect, the present disclosure provides an antibody or antigen-binding fragment thereof comprising at least one, at least two, or all three VH CDR sequences selected from: a. CDR-H1 comprising the amino acid sequence of SEQ ID NO: 651, b. CDR-H2 comprising the amino acid sequence of SEQ ID NO: 1193, c. CDR-H3 comprising the amino acid sequence of SEQ ID NO: 1735, and a VL comprising the amino acid sequence of SEQ ID NO: 380.

[1702] In one aspect, the present disclosure provides an antibody or antigen-binding fragment thereof comprising at least one, at least two, or all three VL CDR sequences selected from: a. CDR-L1 comprising the amino acid sequence of SEQ ID NO: 922, b. CDR-L2 comprising the amino acid sequence of SEQ ID NO: 1464, c. CDR-L3 comprising the amino acid sequence of SEQ ID NO: 2006, and a VH comprising the amino acid sequence of SEQ ID NO: 109.

[1703] In one aspect, an antibody or antigen-binding fragment thereof is provided, wherein the antibody or antigen-binding fragment thereof comprises a heavy chain variable domain (VH) having at least 90%, 91%, 92%, 93%, 94%, 95%, 96%, 97%, 98%, 99%, or 100% sequence identity to the amino acid sequence SEQ ID NO: 109. In some embodiments, a VH sequence having at least 90%, 91%, 92%, 93%, 94%, 95%, 96%, 97%, 98%, or 99% identity contains substitutions (e.g., conservative substitutions), insertions, or deletions relative to the reference sequence, but an antibody or antigen-binding fragment thereof comprising that sequence retains the ability to bind to same antigen as of the parent (e.g., cancer associated antigen). In some embodiments, a total of 1 to 10 amino acids have been substituted, inserted and/or deleted in the amino acid sequence SEQ ID NO: 109. In some embodiments, substitutions, antigen-binding fragment thereof comprises the VH sequence SEQ ID NO: 109, including one or more post-translational modifications of that sequence. In a particular embodiment, the VH comprises one, two or three CDRs selected from: a. CDR-H1, comprising the amino acid sequence SEQ ID NO: 651, b. CDR-H2, comprising the amino acid sequence SEQ ID NO: 1193, and c. CDR-H3, comprising the amino acid sequence SEQ ID NO: 1735.

[1704] In one aspect, an antibody or antigen-binding fragment thereof is provided, wherein the antibody or antigen-binding fragment thereof comprises a light chain variable domain (VL) having at least 90%, 91%, 92%, 93%, 94%, 95%, 96%, 97%, 98%, 99%, or 100% sequence identity to the amino acid sequence SEQ ID NO: 380. In some embodiments, a VL sequence having at least 90%, 91%, 92%, 93%, 94%, 95%, 96%, 97%, 98%, or 99% identity contains substitutions (e.g., conservative substitutions), insertions, or deletions relative to the reference sequence, but an antibody or antigen-binding fragment thereof comprising that sequence retains the ability to bind to same antigen as the parent (e.g., cancer associated antigen). In some embodiments, a total of 1 to 10 amino acids have been substituted, inserted and/or deleted in the amino acid sequence SEQ ID NO: 380. In some embodiments, the substitutions, insertions, or deletions occur in regions outside the CDRs (e.g., in the FRs). Optionally, the antibody or antigen-binding fragment thereof comprises the VL sequence SEQ ID NO: 380, including one or more post-translational modifications of that sequence. In a particular embodiment, the VL comprises one, two or three CDRs selected from: a. CDR-L1, comprising the amino acid sequence SEQ ID NO: 922, b. CDR-L2, comprising the amino acid sequence SEQ ID NO: 1464, and c. CDR-L3, comprising the amino acid sequence SEQ ID NO: 2006.

[1705] In one aspect, an antibody or antigen-binding fragment thereof is provided, wherein the antibody or antigen-binding fragment thereof comprises a VH as in any of the embodiments provided above, and a VL as in any of the embodiments provided above. In some embodiments, the antibody or antigen-binding fragment thereof comprises the VH amino acid sequence of SEQ ID NO: 109, and the VL amino acid sequence of SEQ ID NO: 380, optionally including post-translational modifications of those sequences. TKIC1001

[1706] In one aspect, the present disclosure provides an antibody or antigen-binding fragment thereof comprising at least one or both variable regions selected from: a. VH comprising the amino acid sequence of SEQ ID NO: 110 and b. VL comprising the amino acid sequence of SEQ ID NO: 381.

[1707] In one aspect, the present disclosure provides an antibody or antigen-binding fragment thereof comprising at least one, two, three, four, five, or six CDRs selected from: a. CDR-H1 comprising the amino acid sequence of SEQ ID NO: 652, b. CDR-H2 comprising the amino acid sequence of SEQ ID NO: 1194, c. CDR-H3 comprising the amino acid sequence of SEQ ID NO: 1736, d. CDR-L1 comprising the amino acid sequence of SEQ ID NO: 923, e. CDR-L2 comprising the amino acid sequence of SEQ ID NO: 1465, and f. CDR-L3 comprising the amino acid sequence of SEQ ID NO: 2007.

[1708] In one aspect, the present disclosure provides an antibody or antigen-binding fragment thereof comprising a CDR-H3 comprising the amino acid sequence of SEQ ID NO: 1736, and a CDR-L3 comprising the amino acid sequence of SEQ ID NO: 2007.

[1709] In one aspect, the present disclosure provides an antibody or antigen-binding fragment thereof comprising at least one, at least two, or all three VH CDR sequences selected from: a. CDR-H1 comprising the amino acid sequence of SEQ ID NO: 652, b. CDR-H2 comprising the amino acid sequence of SEQ ID NO: 1194, c. CDR-H3 comprising the amino acid sequence of SEQ ID NO: 1736, and a VL comprising the amino acid sequence of SEQ ID NO: 381.

[1710] In one aspect, the present disclosure provides an antibody or antigen-binding fragment thereof comprising at least one, at least two, or all three VL CDR sequences selected from: a. CDR-L1 comprising the amino acid sequence of SEQ ID NO: 923, b. CDR-L2 comprising the amino acid sequence of SEQ ID NO: 1465, c. CDR-L3 comprising the amino acid sequence of SEQ ID NO: 2007, and a VH comprising the amino acid sequence of SEQ ID NO: 110.

[1711] In one aspect, an antibody or antigen-binding fragment thereof is provided, wherein the antibody or antigen-binding fragment thereof comprises a heavy chain variable domain (VH) having at least 90%, 91%, 92%, 93%, 94%, 95%, 96%, 97%, 98%, 99%, or 100% sequence identity to the amino acid sequence SEQ ID NO: 110. In some embodiments, a VH sequence having at least 90%, 91%, 92%, 93%, 94%, 95%, 96%, 97%, 98%, or 99% identity contains substitutions (e.g., conservative substitutions), insertions, or deletions relative to the reference sequence, but an antibody or antigen-binding fragment thereof comprising that sequence retains the ability to bind to same antigen as of the parent (e.g., cancer associated antigen). In some embodiments, a total of 1 to 10 amino acids have been substituted, inserted and/or deleted in the amino acid sequence SEQ ID NO: 110. In some embodiments, substitutions, insertions, or deletions occur in regions outside the CDRs (e.g., in the FRs). Optionally, the antibody or antigen-binding fragment thereof comprises the VH sequence SEQ ID NO: 110, including one or more post-translational modifications of that sequence. In a particular embodiment, the VH comprises one, two or three CDRs selected from: a. CDR-H1, comprising the amino acid sequence SEQ ID NO: 652, b. CDR-H2, comprising the amino acid sequence SEQ ID NO: 1194, and c. CDR-H3, comprising the amino acid sequence SEQ ID NO: 1736.

[1712] In one aspect, an antibody or antigen-binding fragment thereof is provided, wherein the antibody or antigen-binding fragment thereof comprises a light chain variable domain (VL) having at least 90%, 91%, 92%, 93%, 94%, 95%, 96%, 97%, 98%, 99%, or 100% sequence identity to the amino acid sequence SEQ ID NO: 381. In some embodiments, a VL sequence having at least 90%, 91%, 92%, 93%, 94%, 95%, 96%, 97%, 98%, or 99% identity contains substitutions (e.g., conservative substitutions), insertions, or deletions relative to the reference sequence, but an antibody or antigen-binding fragment thereof comprising that sequence retains the ability to bind to same antigen as the parent (e.g., cancer associated antigen). In some embodiments, a total of 1 to 10 amino acids have been substituted, inserted and/or deleted in the amino acid sequence SEQ ID NO: 381. In some embodiments, the substitutions, insertions, or deletions occur in regions outside the CDRs (e.g., in the FRs). Optionally, the antibody or antigen-binding fragment thereof comprises the VL sequence SEQ ID NO: 381, including one or more post-translational modifications of that sequence. In a particular embodiment, the VL comprises one, two or three CDRs selected from: a. CDR-L1, comprising the amino acid sequence SEQ ID NO: 923, b. CDR-L2, comprising the amino acid sequence SEQ ID NO: 1465, and c. CDR-L3, comprising the amino acid sequence SEQ ID NO: 2007.

[1713] In one aspect, an antibody or antigen-binding fragment thereof is provided, wherein the antibody or antigen-binding fragment thereof comprises a VH as in any of the embodiments provided above, and a VL as in any of the embodiments provided above. In some embodiments, the antibody or antigen-binding fragment thereof comprises the VH amino acid sequence of SEQ ID NO: 110, and the VL amino acid sequence of SEQ ID NO: 381, optionally including post-translational modifications of those sequences.

### TKIC1002

[1714] In one aspect, the present disclosure provides an antibody or antigen-binding fragment thereof comprising at least one or both variable regions selected from: a. VH comprising the amino acid sequence of SEQ ID NO: 111 and b. VL comprising the amino acid sequence of SEQ ID NO: 382.

[1715] In one aspect, the present disclosure provides an antibody or antigen-binding fragment thereof comprising at least one, two, three, four, five, or six CDRs selected from: a. CDR-H1 comprising the amino acid sequence of SEQ ID NO: 653, b. CDR-H2 comprising the amino acid sequence of SEQ ID NO: 1195, c. CDR-H3 comprising the amino acid sequence of SEQ ID NO: 1737, d. CDR-L1 comprising the amino acid sequence of SEQ ID NO: 924, e. CDR-L2 comprising the amino acid sequence of SEQ ID NO: 1466, and f. CDR-L3 comprising the amino acid sequence of SEQ ID NO: 2008.

[1716] In one aspect, the present disclosure provides an antibody or antigen-binding fragment thereof comprising a CDR-H3 comprising the amino acid sequence of SEQ ID NO: 1737, and a CDR-L3 comprising the amino acid sequence of SEQ ID NO: 2008.

[1717] In one aspect, the present disclosure provides an antibody or antigen-binding fragment thereof comprising at least one, at least two, or all three VH CDR sequences selected from: a. CDR-H1 comprising the amino acid sequence of SEQ ID NO: 653, b. CDR-H2 comprising the amino acid sequence of SEQ ID NO: 1195, c. CDR-H3 comprising the amino acid sequence of SEQ ID NO: 1737, and a VL comprising the amino acid sequence of SEQ ID NO: 382.

[1718] In one aspect, the present disclosure provides an antibody or antigen-binding fragment thereof comprising at least one, at least two, or all three VL CDR sequences selected from: a. CDR-L1 comprising the amino acid sequence of SEQ ID NO: 924, b. CDR-L2 comprising the amino acid sequence of SEQ ID NO: 1466, c. CDR-L3 comprising the amino acid sequence of SEQ ID NO: 2008, and a VH comprising the amino acid sequence of SEQ ID NO: 111.

[1719] In one aspect, an antibody or antigen-binding fragment thereof is provided, wherein the antibody or antigen-binding fragment thereof comprises a heavy chain variable domain (VH) having at least 90%, 91%, 92%, 93%, 94%, 95%, 96%, 97%, 98%, 99%, or 100% sequence identity to the amino acid sequence SEQ ID NO: 111. In some embodiments, a VH sequence having at least 90%, 91%, 92%, 93%, 94%, 95%, 96%, 97%, 98%, or 99% identity contains substitutions (e.g., conservative substitutions), insertions, or deletions relative to the reference sequence, but an antibody or antigen-binding fragment thereof comprising that sequence retains the ability to bind to same antigen as of the parent (e.g., cancer associated antigen). In some embodiments, a total of 1 to 10 amino acids have been substituted, inserted and/or deleted in the amino acid sequence SEQ ID NO: 111. In some embodiments, substitutions, insertions, or deletions occur in regions outside the CDRs (e.g., in the FRs). Optionally, the antibody or antigen-binding fragment thereof comprises the VH sequence SEQ ID NO: 111, including one or more post-translational modifications of that sequence. In a particular embodiment, the VH comprises one, two or three CDRs selected from: a. CDR-H1, comprising the amino acid sequence SEQ ID NO: 653, b. CDR-H2, comprising the amino acid sequence SEQ ID NO: 1195, and c. CDR-H3, comprising the amino acid sequence SEQ ID NO: 1737.

[1720] In one aspect, an antibody or antigen-binding fragment thereof is provided, wherein the antibody or antigen-binding fragment thereof comprises a light chain variable domain (VL) having at least 90%, 91%, 92%, 93%, 94%, 95%, 96%, 97%, 98%, 99%, or 100% sequence identity to the amino acid sequence SEQ ID NO: 382. In some embodiments, a VL sequence having at least 90%, 91%, 92%, 93%, 94%, 95%, 96%, 97%, 98%, or 99% identity contains substitutions (e.g., conservative substitutions), insertions, or deletions relative to the reference sequence, but an antibody or antigen-binding fragment thereof comprising that sequence retains the ability to bind to same antigen as the parent (e.g., cancer associated antigen). In some embodiments, a total of 1 to 10 amino acids have been substituted, inserted and/or deleted in the amino acid sequence SEQ ID NO: 382. In some embodiments, the substitutions, insertions, or deletions occur in regions outside the CDRs (e.g., in the FRs). Optionally, the antibody or antigen-binding fragment thereof comprises the VL sequence SEQ ID NO: 382, including one or more post-translational modifications of that sequence. In a particular embodiment, the VL comprises one, two or three CDRs selected from: a. CDR-L1, comprising the amino acid sequence SEQ ID NO: 924, b. CDR-L2, comprising the amino acid sequence SEQ ID NO: 1466, and c. CDR-L3, comprising the amino acid sequence SEQ ID NO: 2008.

[1721] In one aspect, an antibody or antigen-binding fragment thereof is provided, wherein the antibody or antigen-binding fragment thereof comprises a VH as in any of the embodiments provided above, and a VL as in any of the embodiments provided above. In some embodiments, the antibody or antigen-binding fragment thereof comprises the VH amino acid sequence of SEQ ID NO: 111, and the VL amino acid sequence of SEQ ID NO: 382, optionally including post-translational modifications of those sequences.

### TKIC1003

[1722] In one aspect, the present disclosure provides an antibody or antigen-binding fragment thereof comprising at least one or both variable regions selected from: a. VH comprising the amino acid sequence of SEQ ID NO: 112 and b. VL comprising the amino acid sequence of SEQ ID NO: 383.

[1723] In one aspect, the present disclosure provides an antibody or antigen-binding fragment thereof comprising at least one, two, three, four, five, or six CDRs selected from: a. CDR-H1 comprising the amino acid sequence of SEQ ID NO: 654, b. CDR-H2 comprising the amino acid sequence of SEQ ID NO: 1196, c. CDR-H3 comprising the amino acid sequence of SEQ ID NO: 1738, d. CDR-L1 comprising the amino acid sequence of SEQ ID NO: 925, e. CDR-L2 comprising the amino acid sequence of SEQ ID NO: 1467, and f. CDR-L3 comprising the amino acid sequence of SEQ ID NO: 2009.

[1724] In one aspect, the present disclosure provides an antibody or antigen-binding fragment thereof comprising a CDR-H3 comprising the amino acid sequence of SEQ ID NO: 1738, and a CDR-L3 comprising the amino acid sequence of SEQ ID NO: 2009.

[1725] In one aspect, the present disclosure provides an antibody or antigen-binding fragment thereof comprising at least one, at least two, or all three VH CDR sequences selected from: a. CDR-H1 comprising the amino acid sequence of SEQ ID NO: 654, b. CDR-H2 comprising the amino acid sequence of SEQ ID NO: 1196, c. CDR-H3 comprising the amino acid sequence of SEQ ID NO: 1738, and a VL comprising the amino acid sequence of SEQ ID NO: 383.

[1726] In one aspect, the present disclosure provides an antibody or antigen-binding fragment thereof comprising at least one, at least two, or all three VL CDR sequences selected from: a. CDR-L1 comprising the amino acid sequence of SEQ ID NO: 925, b. CDR-L2 comprising the amino acid sequence of SEQ ID NO: 1467, c. CDR-L3 comprising the amino acid sequence of SEQ ID NO: 2009, and a VH comprising the amino acid sequence of SEQ ID NO: 112.

[1727] In one aspect, an antibody or antigen-binding fragment thereof is provided, wherein the antibody or antigen-binding fragment thereof comprises a heavy chain variable domain (VH) having at least 90%, 91%, 92%, 93%, 94%, 95%, 96%, 97%, 98%, 99%, or 100% sequence identity to the amino acid sequence SEQ ID NO: 112. In some embodiments, a VH sequence having at least 90%, 91%, 92%, 93%, 94%, 95%, 96%, 97%, 98%, or 99% identity contains substitutions (e.g., conservative substitutions), insertions, or deletions relative to the reference sequence, but an antibody or antigen-binding fragment thereof comprising that sequence retains the ability to bind to same antigen as of the parent (e.g., cancer associated antigen). In some embodiments, a total of 1 to 10 amino acids have been substituted, inserted and/or deleted in the amino acid sequence SEQ ID NO: 112. In some embodiments, substitutions, insertions, or deletions occur in regions outside the CDRs (e.g., in the FRs). Optionally, the antibody or antigen-binding fragment thereof comprises the VH sequence SEQ ID NO: 112, including one or more post-translational modifications of that sequence. In a particular embodiment, the VH comprises one, two or three CDRs selected from: a. CDR-H1, comprising the amino acid sequence SEQ ID NO: 654, b. CDR-H2, comprising the amino acid sequence SEQ ID NO: 1196, and c. CDR-H3, comprising the amino acid sequence SEQ ID NO: 1738.

[1728] In one aspect, an antibody or antigen-binding fragment thereof is provided, wherein the antibody or antigen-binding fragment thereof comprises a light chain variable domain (VL) having at least 90%, 91%, 92%, 93%, 94%, 95%, 96%, 97%, 98%, 99%, or 100% sequence identity to the amino acid sequence SEQ ID NO: 383. In some embodiments, a VL sequence having at least 90%, 91%, 92%, 93%, 94%, 95%, 96%, 97%, 98%, or 99% identity contains substitutions (e.g., conservative substitutions), insertions, or deletions relative to the reference sequence, but an antibody or antigen-binding fragment thereof comprising that sequence retains the ability to bind to same antigen as the parent (e.g., cancer associated antigen). In some embodiments, a total of 1 to 10 amino acids have been substituted, inserted and/or deleted in the amino acid sequence SEQ ID NO: 383. In some embodiments, the substitutions, insertions, or deletions occur in regions outside the CDRs (e.g., in the FRs). Optionally, the antibody ro antigen-binding fragment thereof comprises the VL sequence SEQ ID NO: 383, including one or more post-translational modifications of that sequence. In a particular embodiment, the VL comprises one, two or three CDRs selected from: a. CDR-L1, comprising the amino acid sequence SEQ ID NO: 925, b. CDR-L2, comprising the amino acid sequence SEQ ID NO: 1467, and c. CDR-L3, comprising the amino acid sequence SEQ ID NO: 2009.

[1729] In one aspect, an antibody or antigen-binding fragment thereof is provided, wherein the antibody or antigen-binding fragment thereof comprises a VH as in any of the embodiments provided above, and a VL as in any of the embodiments provided above. In some embodiments, the antibody or antigen-binding fragment thereof comprises the VH amino acid sequence of SEQ ID NO: 112, and the VL amino acid sequence of SEQ ID NO: 383, optionally including post-translational modifications of those sequences.

### TKIC1004

[1730] In one aspect, the present disclosure provides an antibody or antigen-binding fragment thereof comprising at least one or both variable regions selected from: a. VH comprising the amino acid sequence of SEQ ID NO: 113 and b. VL comprising the amino acid sequence of SEQ ID NO: 384.

[1731] In one aspect, the present disclosure provides an antibody or antigen-binding fragment thereof comprising at least one, two, three, four, five, or six CDRs selected from: a. CDR-H1 comprising the amino acid sequence of SEQ ID NO: 655, b. CDR-H2 comprising the amino acid sequence of SEQ ID NO: 1197, c. CDR-H3 comprising the amino acid sequence of SEQ ID NO: 1739, d. CDR-L1 comprising the amino acid sequence of SEQ ID NO: 926, e. CDR-L2 comprising the amino acid sequence of SEQ ID NO: 1468, and f. CDR-L3 comprising the amino acid sequence of SEQ ID NO: 2010.

[1732] In one aspect, the present disclosure provides an antibody or antigen-binding fragment thereof comprising a CDR-H3 comprising the amino acid sequence of SEQ ID NO: 1739, and a CDR-L3 comprising the amino acid sequence of SEQ ID NO: 2010.

[1733] In one aspect, the present disclosure provides an antibody or antigen-binding fragment thereof comprising at least one, at least two, or all three VH CDR sequences selected from: a. CDR-H1 comprising the amino acid sequence of SEQ ID NO: 655, b. CDR-H2 comprising the amino acid sequence of SEQ ID NO: 1197, c. CDR-H3 comprising the amino acid sequence of SEQ ID NO: 1739, and a VL comprising the amino acid sequence of SEQ ID NO: 384.

[1734] In one aspect, the present disclosure provides an antibody or antigen-binding fragment thereof comprising at least one, at least two, or all three VL CDR sequences selected from: a. CDR-L1 comprising the amino acid sequence of SEQ ID NO: 926, b. CDR-L2 comprising the amino acid sequence of SEQ ID NO: 1468, c. CDR-L3 comprising the amino acid sequence of SEQ ID NO: 2010, and a VH comprising the amino acid sequence of SEQ ID NO: 113.

[1735] In one aspect, an antibody or antigen-binding fragment thereof is provided, wherein the antibody or antigen-binding fragment thereof comprises a heavy chain variable domain (VH) having at least 90%, 91%, 92%, 93%, 94%, 95%, 96%, 97%, 98%, 99%, or 100% sequence identity to the amino acid sequence SEQ ID NO: 113. In some embodiments, a VH sequence having at least 90%, 91%, 92%, 93%, 94%, 95%, 96%, 97%, 98%, or 99% identity contains substitutions (e.g., conservative substitutions), insertions, or deletions relative to the reference sequence, but an antibody or antigen-binding fragment thereof comprising that sequence retains the ability to bind to same antigen as of the parent (e.g., cancer associated antigen). In some embodiments, a total of 1 to 10 amino acids have been substituted, inserted and/or deleted in the amino acid sequence SEQ ID NO: 113. In some embodiments, substitutions, insertions, or deletions occur in regions outside the CDRs (e.g., in the FRs). Optionally, the antibody or antigen-binding fragment thereof comprises the VH sequence SEQ ID NO: 113, including one or more post-translational modifications of that sequence. In a particular embodiment, the VH comprises one, two or three CDRs selected from: a. CDR-H1, comprising the amino acid sequence SEQ ID NO: 655, b. CDR-H2, comprising the amino acid sequence SEQ ID NO: 1197, and c. CDR-H3, comprising the amino acid sequence SEQ ID NO: 1739.

[1736] In one aspect, an antibody or antigen-binding fragment thereof is provided, wherein the antibody or antigen-binding fragment thereof comprises a light chain variable domain (VL) having at least 90%, 91%, 92%, 93%, 94%, 95%, 96%, 97%, 98%, 99%, or 100% sequence identity to the amino acid sequence SEQ ID NO: 384. In some embodiments, a VL sequence having at least 90%, 91%, 92%, 93%, 94%, 95%, 96%, 97%, 98%, or 99% identity contains substitutions (e.g., conservative substitutions), insertions, or deletions relative to the reference sequence, but an antibody or antigen-binding fragment thereof comprising that sequence retains the ability to bind to same antigen as the parent (e.g., cancer associated antigen). In some embodiments, a total of 1 to 10 amino acids have been substituted, inserted and/or deleted in the amino acid sequence SEQ ID NO: 384. In some embodiments, the substitutions, insertions, or deletions occur in regions outside the CDRs (e.g., in the FRs). Optionally, the antibody or antigen-binding fragment thereof comprises the VL sequence SEQ ID NO: 384, including one or more post-translational modifications of that sequence. In a particular embodiment, the VL comprises one, two or three CDRs selected from: a. CDR-L1, comprising the amino acid sequence SEQ ID NO: 926, b. CDR-L2, comprising the amino acid sequence SEQ ID NO: 1468, and c. CDR-L3, comprising the amino acid sequence SEQ ID NO: 2010.

[1737] In one aspect, an antibody or antigen-binding fragment thereof is provided, wherein the antibody or antigen-binding fragment thereof comprises a VH as in any of the embodiments provided above, and a VL as in any of the embodiments provided above. In some embodiments, the antibody or antigen-binding fragment thereof comprises the VH amino acid sequence of SEQ ID NO: 113, and the VL amino acid sequence of SEQ ID NO: 384, optionally including post-translational modifications of those sequences.

### TKIC1005

[1738] In one aspect, the present disclosure provides an antibody or antigen-binding fragment thereof comprising at least one or both variable regions selected from: a. VH comprising the amino acid sequence of SEQ ID NO: 114 and b. VL comprising the amino acid sequence of SEQ ID NO: 385.

[1739] In one aspect, the present disclosure provides an antibody or antigen-binding fragment thereof comprising at least one, two, three, four, five, or six CDRs selected from: a. CDR-H1 comprising the amino acid sequence of SEQ ID NO: 656, b. CDR-H2 comprising the amino acid sequence of SEQ ID NO: 1198, c. CDR-H3 comprising the amino acid sequence of SEQ ID NO: 1740, d. CDR-L1 comprising the amino acid sequence of SEQ ID NO: 927, e. CDR-L2 comprising the amino acid sequence of SEQ ID NO: 1469, and f. CDR-L3 comprising the amino acid sequence of SEQ ID NO: 2011.

[1740] In one aspect, the present disclosure provides an antibody or antigen-binding fragment thereof comprising a CDR-H3 comprising the amino acid sequence of SEQ ID NO: 1740, and a CDR-L3 comprising the amino acid sequence of SEQ ID NO: 2011.

[1741] In one aspect, the present disclosure provides an antibody or antigen-binding fragment thereof comprising at least one, at least two, or all three VH CDR sequences selected from: a. CDR-H1 comprising the amino acid sequence of SEQ ID NO: 656, b. CDR-H2 comprising the amino acid sequence of SEQ ID NO: 1198, c. CDR-H3 comprising the amino acid sequence of SEQ ID NO: 1740, and a VL comprising the amino acid sequence of SEQ ID NO: 385.

[1742] In one aspect, the present disclosure provides an antibody or antigen-binding fragment thereof comprising at least one, at least two, or all three VL CDR sequences selected from: a. CDR-L1 comprising the amino acid sequence of SEQ ID NO: 927, b. CDR-L2 comprising the amino acid sequence of SEQ ID NO: 1469, c. CDR-L3 comprising the amino acid sequence of SEQ ID NO: 2011, and a VH comprising the amino acid sequence of SEQ ID NO: 114.

[1743] In one aspect, an antibody or antigen-binding fragment thereof is provided, wherein the antibody or antigen-binding fragment thereof comprises a heavy chain variable domain (VH) having at least 90%, 91%, 92%, 93%, 94%, 95%, 96%, 97%, 98%, 99%, or 100% sequence identity to the amino acid sequence SEQ ID NO: 114. In some embodiments, a VH sequence having at least 90%, 91%, 92%, 93%, 94%, 95%, 96%, 97%, 98%, or 99% identity contains substitutions (e.g., conservative substitutions), insertions, or deletions relative to the reference sequence, but an antibody or antigen-binding fragment thereof comprising that sequence retains the ability to bind to same antigen as of the parent (e.g., cancer associated antigen). In some embodiments, a total of 1 to 10 amino acids have been substituted, inserted and/or deleted in the amino acid sequence SEQ ID NO: 114. In some embodiments, substitutions, insertions, or deletions occur in regions outside the CDRs (e.g., in the FRs). Optionally, the antibody or antigen-binding fragment thereof comprises the VH sequence SEQ ID NO: 114, including one or more post-translational modifications of that sequence. In a particular embodiment, the VH comprises one, two or three CDRs selected from: a. CDR-H1, comprising the amino acid sequence SEQ ID NO: 656, b. CDR-H2, comprising the amino acid sequence SEQ ID NO: 1198, and c. CDR-H3, comprising the amino acid sequence SEQ ID NO: 1740.

[1744] In one aspect, an antibody or antigen-binding fragment thereof is provided, wherein the antibody or antigen-binding fragment thereof comprises a light chain variable domain (VL) having at least 90%, 91%, 92%, 93%, 94%, 95%, 96%, 97%, 98%, 99%, or 100% sequence identity to the amino acid sequence SEQ ID NO: 385. In some embodiments, a VL sequence having at least 90%, 91%, 92%, 93%, 94%, 95%, 96%, 97%, 98%, or 99% identity contains substitutions (e.g., conservative substitutions), insertions, or deletions relative to the reference sequence, but an antibody or antigen-binding fragment thereof comprising that sequence retains the ability to bind to same antigen as the parent (e.g., cancer associated antigen). In some embodiments, a total of 1 to 10 amino acids have been substituted, inserted and/or deleted in the amino acid sequence SEQ ID NO: 385. In some embodiments, the substitutions, insertions, or deletions occur in regions outside the CDRs (e.g., in the FRs). Optionally, the antibody or antigen-binding fragment thereof comprises the VL sequence SEQ ID NO: 385, including one or more post-translational modifications of that sequence. In a particular embodiment, the VL comprises one, two or three CDRs selected from: a. CDR-L1, comprising the amino acid sequence SEQ ID NO: 927, b. CDR-L2, comprising the amino acid sequence SEQ ID NO: 1469, and c. CDR-L3, comprising the amino acid sequence SEQ ID NO: 2011.

[1745] In one aspect, an antibody or antigen-binding fragment thereof is provided, wherein the antibody or antigen-binding fragment thereof comprises a VH as in any of the embodiments provided above, and a VL as in any of the embodiments provided above. In some embodiments, the antibody or antigen-binding fragment thereof comprises the VH amino acid sequence of SEQ ID NO: 114, and the VL amino acid sequence of SEQ ID NO: 385, optionally including post-translational modifications of those sequences.

### TKIC1006

[1746] In one aspect, the present disclosure provides an antibody or antigen-binding fragment thereof comprising at least one or both variable regions selected from: a. VH comprising the amino acid sequence of SEQ ID NO: 115 and b. VL comprising the amino acid sequence of SEQ ID NO: 386.

[1747] In one aspect, the present disclosure provides an antibody or antigen-binding fragment thereof comprising at least one, two, three, four, five, or six CDRs selected from: a. CDR-H1 comprising the amino acid sequence of SEQ ID NO: 657, b. CDR-H2 comprising the amino acid sequence of SEQ ID NO: 1199, c. CDR-H3 comprising the amino acid sequence of SEQ ID NO: 1741, d. CDR-L1 comprising the amino acid sequence of SEQ ID NO: 928, e. CDR-L2 comprising the amino acid sequence of SEQ ID NO: 1470, and f. CDR-L3 comprising the amino acid sequence of SEQ ID NO: 2012.

[1748] In one aspect, the present disclosure provides an antibody or antigen-binding fragment thereof comprising a CDR-H3 comprising the amino acid sequence of SEQ ID NO: 1741, and a CDR-L3 comprising the amino acid sequence of SEQ ID NO: 2012.

[1749] In one aspect, the present disclosure provides an antibody or antigen-binding fragment thereof comprising at least one, at least two, or all three VH CDR sequences selected from: a. CDR-H1 comprising the amino acid sequence of SEQ ID NO: 657, b. CDR-H2 comprising the amino acid sequence of SEQ ID NO: 1199, c. CDR-H3 comprising the amino acid sequence of SEQ ID NO: 1741, and a VL comprising the amino acid sequence of SEQ ID NO: 386.

[1750] In one aspect, the present disclosure provides an antibody or antigen-binding fragment thereof comprising at least one, at least two, or all three VL CDR sequences selected from: a. CDR-L1 comprising the amino acid sequence of SEQ ID NO: 928, c. CDR-L2 comprising the amino acid sequence of SEQ ID NO: 1470, d. CDR-L3 comprising the amino acid sequence of SEQ ID NO: 2012, and a VH comprising the amino acid sequence of SEQ ID NO: 115.

[1751] In one aspect, an antibody or antigen-binding fragment thereof is provided, wherein the antibody or antigen-binding fragment thereof comprises a heavy chain variable domain (VH) having at least 90%, 91%, 92%, 93%, 94%, 95%, 96%, 97%, 98%, 99%, or 100% sequence identity to the amino acid sequence SEQ ID NO: 115. In some embodiments, a VH sequence having at least 90%, 91%, 92%, 93%, 94%, 95%, 96%, 97%, 98%, or 99% identity contains substitutions (e.g., conservative substitutions), insertions, or deletions relative to the reference sequence, but an antibody or antigen-binding fragment thereof comprising that sequence retains the ability to bind to same antigen as of the parent (e.g., cancer associated antigen). In some embodiments, a total of 1 to 10 amino acids have been substituted, inserted and/or deleted in the amino acid sequence SEQ ID NO: 115. In some embodiments, substitutions, insertions, or deletions occur in regions outside the CDRs (e.g., in the FRs). Optionally, the antibody or antigen-binding fragment thereof comprises the VH sequence SEQ ID NO: 115, including one or more post-translational modifications of that sequence. In a particular embodiment, the VH comprises one, two or three CDRs selected from: a. CDR-H1, comprising the amino acid sequence SEQ ID NO: 657, b. CDR-H2, comprising the amino acid sequence SEQ ID NO: 1199, and c. CDR-H3, comprising the amino acid sequence SEQ ID NO: 1741.

[1752] In one aspect, an antibody or antigen-binding fragment thereof is provided, wherein the antibody or antigen-binding fragment thereof comprises a light chain variable domain (VL) having at least 90%, 91%, 92%, 93%, 94%, 95%, 96%, 97%, 98%, 99%, or 100% sequence identity to the amino acid sequence SEQ ID NO: 386. In some embodiments, a VL sequence having at least 90%, 91%, 92%, 93%, 94%, 95%, 96%, 97%, 98%, or 99% identity contains substitutions (e.g., conservative substitutions), insertions, or deletions relative to the reference sequence, but an antibody or antigen-binding fragment thereof comprising that sequence retains the ability to bind to same antigen as the parent (e.g., cancer associated antigen). In some embodiments, a total of 1 to 10 amino acids have been substituted, inserted and/or deleted in the amino acid sequence SEQ ID NO: 386. In some embodiments, the substitutions, insertions, or deletions occur in regions outside the CDRs (e.g., in the FRs). Optionally, the antibody or antigen-binding fragment thereof comprises the VL sequence SEQ ID NO: 386, including one or more post-translational modifications of that sequence. In a particular embodiment, the VL comprises one, two or three CDRs selected from: a. CDR-L1, comprising the amino acid sequence SEQ ID NO: 928, b. CDR-L2, comprising the amino acid sequence SEQ ID NO: 1470, and c. CDR-L3, comprising the amino acid sequence SEQ ID NO: 2012.

[1753] In one aspect, an antibody or antigen-binding fragment thereof is provided, wherein the antibody or antigen-binding fragment thereof comprises a VH as in any of the embodiments provided above, and a VL as in any of the embodiments provided above. In some embodiments, the antibody or antigen-binding fragment thereof comprises the VH amino acid sequence of SEQ ID NO: 115, and the VL amino acid sequence of SEQ ID NO: 386, optionally including post-translational modifications of those sequences.

### TKIC1007

[1754] In one aspect, the present disclosure provides an antibody or antigen-binding fragment thereof comprising at least one or both variable regions selected from: a. VH comprising the amino acid sequence of SEQ ID NO: 116 and b. VL comprising the amino acid sequence of SEQ ID NO: 387.

[1755] In one aspect, the present disclosure provides an antibody or antigen-binding fragment thereof comprising at least one, two, three, four, five, or six CDRs selected from: a. CDR-H1 comprising the amino acid sequence of SEQ ID NO: 658, b. CDR-H2 comprising the amino acid sequence of SEQ ID NO: 1200, c. CDR-H3 comprising the amino acid sequence of SEQ ID NO: 1742, d. CDR-L1 comprising the amino acid sequence of SEQ ID NO: 929, e. CDR-L2 comprising the amino acid sequence of SEQ ID NO: 1471, and f. CDR-L3 comprising the amino acid sequence of SEQ ID NO: 2013.

[1756] In one aspect, the present disclosure provides an antibody or antigen-binding fragment thereof comprising a CDR-H3 comprising the amino acid sequence of SEQ ID NO: 1742 and a CDR-L3 comprising the amino acid sequence of SEQ ID NO: 2013.

[1757] In one aspect, the present disclosure provides an antibody or antigen-binding fragment thereof comprising at least one, at least two, or all three VH CDR sequences selected from: a. CDR-H1 comprising the amino acid sequence of SEQ ID NO: 658, b. CDR-H2 comprising the amino acid sequence of SEQ ID NO: 1200, c. CDR-H3 comprising the amino acid sequence of SEQ ID NO: 1742, and a VL comprising the amino acid sequence of SEQ ID NO: 387.

[1758] In one aspect, the present disclosure provides an antibody or antigen-binding fragment thereof comprising at least one, at least two, or all three VL CDR sequences selected from: a. CDR-L1 comprising the amino acid sequence of SEQ ID NO: 929, b. CDR-L2 comprising the amino acid sequence of SEQ ID NO: 1471, c. CDR-L3 comprising the amino acid sequence of SEQ ID NO: 2013, and a VH comprising the amino acid sequence of SEQ ID NO: 116.

[1759] In one aspect, an antibody or antigen-binding fragment thereof is provided, wherein the antibody or antigen-binding fragment thereof comprises a heavy chain variable domain (VH) having at least 90%, 91%, 92%, 93%, 94%, 95%, 96%, 97%, 98%, 99%, or 100% sequence identity to the amino acid sequence SEQ ID NO: 116. In some embodiments, a VH sequence having at least 90%, 91%, 92%, 93%, 94%, 95%, 96%, 97%, 98%, or 99% identity contains substitutions (e.g., conservative substitutions), insertions, or deletions relative to the reference sequence, but an antibody or antigen-binding fragment thereof comprising that sequence retains the ability to bind to same antigen as of the parent (e.g., cancer associated antigen). In some embodiments, a total of 1 to 10 amino acids have been substituted, inserted and/or deleted in the amino acid sequence SEQ ID NO: 116. In some embodiments, substitutions, insertions, or deletions occur in regions outside the CDRs (e.g., in the FRs). Optionally, the antibody or antigen-binding fragment thereof comprises the VH sequence SEQ ID NO: 116, including one or more post-translational modifications of that sequence. In a particular embodiment, the VH comprises one, two or three CDRs selected from: a. CDR-H1, comprising the amino acid sequence SEQ ID NO: 658, b. CDR-H2, comprising the amino acid sequence SEQ ID NO: 1200, and c. CDR-H3, comprising the amino acid sequence SEQ ID NO: 1742.

[1760] In one aspect, an antibody or antigen-binding fragment thereof is provided, wherein the antibody or antigen-binding fragment thereof comprises a light chain variable domain (VL) having at least 90%, 91%, 92%, 93%, 94%, 95%, 96%, 97%, 98%, 99%, or 100% sequence identity to the amino acid sequence SEQ ID NO: 387. In some embodiments, a VL sequence having at least 90%, 91%, 92%, 93%, 94%, 95%, 96%, 97%, 98%, or 99% identity contains substitutions (e.g., conservative substitutions), insertions, or deletions relative to the reference sequence, but an antibody or antigen-binding fragment thereof comprising that sequence retains the ability to bind to same antigen as the parent (e.g., cancer associated antigen). In some embodiments, a total of 1 to 10 amino acids have been substituted, inserted and/or deleted in the amino acid sequence SEQ ID NO: 387. In some embodiments, the substitutions, insertions, or deletions occur in regions outside the CDRs (e.g., in the FRs). Optionally, the antibody or antigen-binding fragment thereof comprises the VL sequence SEQ ID NO: 387, including one or more post-translational modifications of that sequence. In a particular embodiment, the VL comprises one, two or three CDRs selected from: a. CDR-L1, comprising the amino acid sequence SEQ ID NO: 929, b. CDR-L2, comprising the amino acid sequence SEQ ID NO: 1471, and c. CDR-L3, comprising the amino acid sequence SEQ ID NO: 2013.

[1761] In one aspect, an antibody or antigen-binding fragment thereof is provided, wherein the antibody or antigen-binding fragment thereof comprises a VH as in any of the embodiments provided above, and a VL as in any of the embodiments provided above. In some embodiments, the antibody or antigen-binding fragment thereof comprises the VH amino acid sequence of SEQ ID NO: 116, and the VL amino acid sequence of SEQ ID NO: 387, optionally including post-translational modifications of those sequences.

### TKIC1008

[1762] In one aspect, the present disclosure provides an antibody or antigen-binding fragment thereof comprising at least one or both variable regions selected from: a. VH comprising the amino acid sequence of SEQ ID NO: 117 and b. VL comprising the amino acid sequence of SEQ ID NO: 388.

[1763] In one aspect, the present disclosure provides an antibody or antigen-binding fragment thereof comprising at least one, two, three, four, five, or six CDRs selected from: a. CDR-H1 comprising the amino acid sequence of SEQ ID NO: 659, b. CDR-H2 comprising the amino acid sequence of SEQ ID NO: 1201, c. CDR-H3 comprising the amino acid sequence of SEQ ID NO: 1743, d. CDR-L1 comprising the amino acid sequence of SEQ ID NO: 930, e. CDR-L2 comprising the amino acid sequence of SEQ ID NO: 1472, and f. CDR-L3 comprising the amino acid sequence of SEQ ID NO: 2014.

[1764] In one aspect, the present disclosure provides an antibody or antigen-binding fragment thereof comprising a CDR-H3 comprising the amino acid sequence of SEQ ID NO: 1743, and a CDR-L3 comprising the amino acid sequence of SEQ ID NO: 2014.

[1765] In one aspect, the present disclosure provides an antibody or antigen-binding fragment thereof comprising at least one, at least two, or all three VH CDR sequences selected from: a. CDR-H1 comprising the amino acid sequence of SEQ ID NO: 659, b. CDR-H2 comprising the amino acid sequence of SEQ ID NO: 1201, c. CDR-H3 comprising the amino acid sequence of SEQ ID NO: 1743, and a VL comprising the amino acid sequence of SEQ ID NO: 388.

[1766] In one aspect, the present disclosure provides an antibody or antigen-binding fragment thereof comprising at least one, at least two, or all three VL CDR sequences selected from: a. CDR-L1 comprising the amino acid sequence of SEQ ID NO: 930, b. CDR-L2 comprising the amino acid sequence of SEQ ID NO: 1472, c. CDR-L3 comprising the amino acid sequence of SEQ ID NO: 2014, and a VH comprising the amino acid sequence of SEQ ID NO: 117.

[1767] In one aspect, an antibody or antigen-binding fragment thereof is provided, wherein the antibody or antigen-binding fragment thereof comprises a heavy chain variable domain (VH) having at least 90%, 91%, 92%, 93%, 94%, 95%, 96%, 97%, 98%, 99%, or 100% sequence identity to the amino acid sequence SEQ ID NO: 117. In some embodiments, a VH sequence having at least 90%, 91%, 92%, 93%, 94%, 95%, 96%, 97%, 98%, or 99% identity contains substitutions (e.g., conservative substitutions), insertions, or deletions relative to the reference sequence, but an antibody or antigen-binding fragment thereof comprising that sequence retains the ability to bind to same antigen as of the parent (e.g., cancer associated antigen). In some embodiments, a total of 1 to 10 amino acids have been substituted, inserted and/or deleted in the amino acid sequence SEQ ID NO: 117. In some embodiments, substitutions, insertions, or deletions occur in regions outside the CDRs (e.g., in the FRs). Optionally, the antibody or antigen-binding fragment thereof comprises the VH sequence SEQ ID NO: 117, including one or more post-translational modifications of that sequence. In a particular embodiment, the VH comprises one, two or three CDRs selected from: a. CDR-H1, comprising the amino acid sequence SEQ ID NO: 659, b. CDR-H2, comprising the amino acid sequence SEQ ID NO: 1201, and c. CDR-H3, comprising the amino acid sequence SEQ ID NO: 1743.

[1768] In one aspect, an antibody or antigen-binding fragment thereof is provided, wherein the antibody or antigen-binding fragment thereof comprises a light chain variable domain (VL) having at least 90%, 91%, 92%, 93%, 94%, 95%, 96%, 97%, 98%, 99%, or 100% sequence identity to the amino acid sequence SEQ ID NO: 388. In some embodiments, a VL sequence having at least 90%, 91%, 92%, 93%, 94%, 95%, 96%, 97%, 98%, or 99% identity contains substitutions (e.g., conservative substitutions), insertions, or deletions relative to the reference sequence, but an antibody or antigen-binding fragment thereof comprising that sequence retains the ability to bind to same antigen as the parent (e.g., cancer associated antigen). In some embodiments, a total of 1 to 10 amino acids have been substituted, inserted and/or deleted in the amino acid sequence SEQ ID NO: 388. In some embodiments, the substitutions, insertions, or deletions occur in regions outside the CDRs (e.g., in the FRs). Optionally, the antibody or antigen-binding fragment thereof comprises the VL sequence SEQ ID NO: 388, including one or more post-translational modifications of that sequence. In a particular embodiment, the VL comprises one, two or three CDRs selected from: a. CDR-L1, comprising the amino acid sequence SEQ ID NO: 930, b. CDR-L2, comprising the amino acid sequence SEQ ID NO: 1472, and c. CDR-L3, comprising the amino acid sequence SEQ ID NO: 2014.

[1769] In one aspect, an antibody or antigen-binding fragment thereof is provided, wherein the antibody or antigen-binding fragment thereof comprises a VH as in any of the embodiments provided above, and a VL as in any of the embodiments provided above. In some embodiments, the antibody or antigen-binding fragment thereof comprises the VH amino acid sequence of SEQ ID NO: 117, and the VL amino acid sequence of SEQ ID NO: 388, optionally including post-translational modifications of those sequences.

### TKIC1009

[1770] In one aspect, the present disclosure provides an antibody or antigen-binding fragment thereof comprising at least one or both variable regions selected from: a. VH comprising the amino acid sequence of SEQ ID NO: 118 and b. VL comprising the amino acid sequence of SEQ ID NO: 389.

[1771] In one aspect, the present disclosure provides an antibody or antigen-binding fragment thereof comprising at least one, two, three, four, five, or six CDRs selected from: a. CDR-H1 comprising the amino acid sequence of SEQ ID NO: 660, b. CDR-H2 comprising the amino acid sequence of SEQ ID NO: 1202, c. CDR-H3 comprising the amino acid sequence of SEQ ID NO: 1744, d. CDR-L1 comprising the amino acid sequence of SEQ ID NO: 931, e. CDR-L2 comprising the amino acid sequence of SEQ ID NO: 1473, and f. CDR-L3 comprising the amino acid sequence of SEQ ID NO: 2015.

[1772] In one aspect, the present disclosure provides an antibody or antigen-binding fragment thereof comprising a CDR-H3 comprising the amino acid sequence of SEQ ID NO: 1744, and a CDR-L3 comprising the amino acid sequence of SEQ ID NO: 2015.

[1773] In one aspect, the present disclosure provides an antibody or antigen-binding fragment thereof comprising at least one, at least two, or all three VH CDR sequences selected from: a. CDR-H1 comprising the amino acid sequence of SEQ ID NO: 660, b. CDR-H2 comprising the amino acid sequence of SEQ ID NO: 1202, c. CDR-H3 comprising the amino acid sequence of SEQ ID NO: 1744, and a VL comprising the amino acid sequence of SEQ ID NO: 389.

[1774] In one aspect, the present disclosure provides an antibody or antigen-binding fragment thereof comprising at least one, at least two, or all three VL CDR sequences selected from: a. CDR-L1 comprising the amino acid sequence of SEQ ID NO: 931, b. CDR-L2 comprising the amino acid sequence of SEQ ID NO: 1473, c. CDR-L3 comprising the amino acid sequence of SEQ ID NO: 2015, and a VH comprising the amino acid sequence of SEQ ID NO: 118.

[1775] In one aspect, an antibody or antigen-binding fragment thereof is provided, wherein the antibody or antigen-binding fragment thereof comprises a heavy chain variable domain (VH) having at least 90%, 91%, 92%, 93%, 94%, 95%, 96%, 97%, 98%, 99%, or 100% sequence identity to the amino acid sequence SEQ ID NO: 118. In some embodiments, a VH sequence having at least 90%, 91%, 92%, 93%, 94%, 95%, 96%, 97%, 98%, or 99% identity contains substitutions (e.g., conservative substitutions), insertions, or deletions relative to the reference sequence, but an antibody or antigen-binding fragment thereof comprising that sequence retains the ability to bind to same antigen as of the parent (e.g., cancer associated antigen). In some embodiments, a total of 1 to 10 amino acids have been substituted, inserted and/or deleted in the amino acid sequence SEQ ID NO: 118. In some embodiments, substitutions, insertions, or deletions occur in regions outside the CDRs (e.g., in the FRs). Optionally, the antibody or antigen-binding fragment thereof comprises the VH sequence SEQ ID NO: 118, including one or more post-translational modifications of that sequence. In a particular embodiment, the VH comprises one, two or three CDRs selected from: a. CDR-H1, comprising the amino acid sequence SEQ ID NO: 660, b. CDR-H2, comprising the amino acid sequence SEQ ID NO: 1202, and c. CDR-H3, comprising the amino acid sequence SEQ ID NO: 1744.

[1776] In one aspect, an antibody or antigen-binding fragment thereof is provided, wherein the antibody or antigen-binding fragment thereof comprises a light chain variable domain (VL) having at least 90%, 91%, 92%, 93%, 94%, 95%, 96%, 97%, 98%, 99%, or 100% sequence identity to the amino acid sequence SEQ ID NO: 389. In some embodiments, a VL sequence having at least 90%, 91%, 92%, 93%, 94%, 95%, 96%, 97%, 98%, or 99% identity contains substitutions (e.g., conservative substitutions), insertions, or deletions relative to the reference sequence, but an antibody or antigen-binding fragment thereof comprising that sequence retains the ability to bind to same antigen as the parent (e.g., cancer associated antigen). In some embodiments, a total of 1 to 10 amino acids have been substituted, inserted and/or deleted in the amino acid sequence SEQ ID NO: 389. In some embodiments, the substitutions, insertions, or deletions occur in regions outside the CDRs (e.g., in the FRs). Optionally, the antibody or antigen-binding fragment thereof comprises the VL sequence SEQ ID NO: 389, including one or more post-translational modifications of that sequence. In a particular embodiment, the VL comprises one, two or three CDRs selected from: a. CDR-L1, comprising the amino acid sequence SEQ ID NO: 931, b. CDR-L2, comprising the amino acid sequence SEQ ID NO: 1473, and c. CDR-L3, comprising the amino acid sequence SEQ ID NO: 2015.

[1777] In one aspect, an antibody or antigen-binding fragment thereof is provided, wherein the antibody or antigen-binding fragment thereof comprises a VH as in any of the embodiments provided above, and a VL as in any of the embodiments provided above. In some embodiments, the antibody or antigen-binding fragment thereof comprises the VH amino acid sequence of SEQ ID NO: 118, and the VL amino acid sequence of SEQ ID NO: 389, optionally including post-translational modifications of those sequences.

### TKIC1010

[1778] In one aspect, the present disclosure provides an antibody or antigen-binding fragment thereof comprising at least one or both variable regions selected from: a. VH comprising the amino acid sequence of SEQ ID NO: 119 and b. VL comprising the amino acid sequence of SEQ ID NO: 390.

[1779] In one aspect, the present disclosure provides an antibody or antigen-binding fragment thereof comprising at least one, two, three, four, five, or six CDRs selected from: a. CDR-H1 comprising the amino acid sequence of SEQ ID NO: 661, b. CDR-H2 comprising the amino acid sequence of SEQ ID NO: 1203, c. CDR-H3 comprising the amino acid sequence of SEQ ID NO: 1745, d. CDR-L1 comprising the amino acid sequence of SEQ ID NO: 932, e. CDR-L2 comprising the amino acid sequence of SEQ ID NO: 1474, and f. CDR-L3 comprising the amino acid sequence of SEQ ID NO: 2016.

[1780] In one aspect, the present disclosure provides an antibody or antigen-binding fragment thereof comprising a CDR-H3 comprising the amino acid sequence of SEQ ID NO: 1745, and a CDR-L3 comprising the amino acid sequence of SEQ ID NO: 2016.

[1781] In one aspect, the present disclosure provides an antibody or antigen-binding fragment thereof comprising at least one, at least two, or all three VH CDR sequences selected from: a. CDR-H1 comprising the amino acid sequence of SEQ ID NO: 661, b. CDR-H2 comprising the amino acid sequence of SEQ ID NO: 1203, c. CDR-H3 comprising the amino acid sequence of SEQ ID NO: 1745, and a VL comprising the amino acid sequence of SEQ ID NO: 390.

[1782] In one aspect, the present disclosure provides an antibody or antigen-binding fragment thereof comprising at least one, at least two, or all three VL CDR sequences selected from: a CDR-L1 comprising the amino acid sequence of SEQ ID NO: 932, b. CDR-L2 comprising the amino acid sequence of SEQ ID NO: 1474, c. CDR-L3 comprising the amino acid sequence of SEQ ID NO: 2016, and d. VH comprising the amino acid sequence of SEQ ID NO: 119.

[1783] In one aspect, an antibody or antigen-binding fragment thereof is provided, wherein the antibody or antigen-binding fragment thereof comprises a heavy chain variable domain (VH) having at least 90%, 91%, 92%, 93%, 94%, 95%, 96%, 97%, 98%, 99%, or 100% sequence identity to the amino acid sequence SEQ ID NO: 119. In some embodiments, a VH sequence having at least 90%, 91%, 92%, 93%, 94%, 95%, 96%, 97%, 98%, or 99% identity contains substitutions (e.g., conservative substitutions), insertions, or deletions relative to the reference sequence, but an antibody or antigen-binding fragment thereof comprising that sequence retains the ability to bind to same antigen as of the parent (e.g., cancer associated antigen). In some embodiments, a total of 1 to 10 amino acids have been substituted, inserted and/or deleted in the amino acid sequence SEQ ID NO: 119. In some embodiments, substitutions, insertions, or deletions occur in regions outside the CDRs (e.g., in the FRs). Optionally, the antibody or antigen-binding fragment thereof comprises the VH sequence SEQ ID NO: 119, including one or more post-translational modifications of that sequence. In a particular embodiment, the VH comprises one, two or three CDRs selected from: a. CDR-H1, comprising the amino acid sequence SEQ ID NO: 661, b. CDR-H2, comprising the amino acid sequence SEQ ID NO: 1203, and c. CDR-H3, comprising the amino acid sequence SEQ ID NO: 1745.

[1784] In one aspect, an antibody or antigen-binding fragment thereof is provided, wherein the antibody or antigen-binding fragment thereof comprises a light chain variable domain (VL) having at least 90%, 91%, 92%, 93%, 94%, 95%, 96%, 97%, 98%, 99%, or 100% sequence identity to the amino acid sequence SEQ ID NO: 390. In some embodiments, a VL sequence having at least 90%, 91%, 92%, 93%, 94%, 95%, 96%, 97%, 98%, or 99% identity contains substitutions (e.g., conservative substitutions), insertions, or deletions relative to the reference sequence, but an antibody or antigen-binding fragment thereof comprising that sequence retains the ability to bind to same antigen as the parent (e.g., cancer associated antigen). In some embodiments, a total of 1 to 10 amino acids have been substituted, inserted and/or deleted in the amino acid sequence SEQ ID NO: 390. In some embodiments, the substitutions, insertions, or deletions occur in regions outside the CDRs (e.g., in the FRs). Optionally, the antibody or antigen-binding fragment thereof comprises the VL sequence SEQ ID NO: 390, including one or more post-translational modifications of that sequence. In a particular embodiment, the VL comprises one, two or three CDRs selected from: a. CDR-L1, comprising the amino acid sequence SEQ ID NO: 932, b. CDR-L2, comprising the amino acid sequence SEQ ID NO: 1474, and c. CDR-L3, comprising the amino acid sequence SEQ ID NO: 2016.

[1785] In one aspect, an antibody or antigen-binding fragment thereof is provided, wherein the antibody or antigen-binding fragment thereof comprises a VH as in any of the embodiments provided above, and a VL as in any of the embodiments provided above. In some embodiments, the antibody or antigen-binding fragment thereof comprises the VH amino acid sequence of SEQ ID NO: 119, and the VL amino acid sequence of SEQ ID NO: 390, optionally including post-translational modifications of those sequences.

### TKIC1011

[1786] In one aspect, the present disclosure provides an antibody or antigen-binding fragment thereof comprising at least one or both variable regions selected from: a. VH comprising the amino acid sequence of SEQ ID NO: 120 and b. VL comprising the amino acid sequence of SEQ ID NO: 391.

[1787] In one aspect, the present disclosure provides an antibody or antigen-binding fragment thereof comprising at least one, two, three, four, five, or six CDRs selected from: a. CDR-H1 comprising the amino acid sequence of SEQ ID NO: 662, b. CDR-H2 comprising the amino acid sequence of SEQ ID NO: 1204, c. CDR-H3 comprising the amino acid sequence of SEQ ID NO: 1746, d. CDR-L1 comprising the amino acid sequence of SEQ ID NO: 933, e. CDR-L2 comprising the amino acid sequence of SEQ ID NO: 1475, and f. CDR-L3 comprising the amino acid sequence of SEQ ID NO: 2017.

[1788] In one aspect, the present disclosure provides an antibody or antigen-binding fragment thereof comprising a CDR-H3 comprising the amino acid sequence of SEQ ID NO: 1746, and a CDR-L3 comprising the amino acid sequence of SEQ ID NO: 2017.

[1789] In one aspect, the present disclosure provides an antibody or antigen-binding fragment thereof comprising at least one, at least two, or all three VH CDR sequences selected from: a. CDR-H1 comprising the amino acid sequence of SEQ ID NO: 662, b. CDR-H2 comprising the amino acid sequence of SEQ ID NO: 1204, c. CDR-H3 comprising the amino acid sequence of SEQ ID NO: 1746, and a VL comprising the amino acid sequence of SEQ ID NO: 391.

[1790] In one aspect, the present disclosure provides an antibody or antigen-binding fragment thereof comprising at least one, at least two, or all three VL CDR sequences selected from: a. CDR-L1 comprising the amino acid sequence of SEQ ID NO: 933, b. CDR-L2 comprising the amino acid sequence of SEQ ID NO: 1475, c. CDR-L3 comprising the amino acid sequence of SEQ ID NO: 2017, and a VH comprising the amino acid sequence of SEQ ID NO: 120.

[1791] In one aspect, an antibody or antigen-binding fragment thereof is provided, wherein the antibody or antigen-binding fragment thereof comprises a heavy chain variable domain (VH) having at least 90%, 91%, 92%, 93%, 94%, 95%, 96%, 97%, 98%, 99%, or 100% sequence identity to the amino acid sequence SEQ ID NO: 120. In some embodiments, a VH sequence having at least 90%, 91%, 92%, 93%, 94%, 95%, 96%, 97%, 98%, or 99% identity contains substitutions (e.g., conservative substitutions), insertions, or deletions relative to the reference sequence, but an antibody or antigen-binding fragment thereof comprising that sequence retains the ability to bind to same antigen as of the parent (e.g., cancer associated antigen). In some embodiments, a total of 1 to 10 amino acids have been substituted, inserted and/or deleted in the amino acid sequence SEQ ID NO: 120. In some embodiments, substitutions, insertions, or deletions occur in regions outside the CDRs (e.g., in the FRs). Optionally, the antibody or antigen-binding fragment thereof comprises the VH sequence SEQ ID NO: 120, including one or more post-translational modifications of that sequence. In a particular embodiment, the VH comprises one, two or three CDRs selected from: a. CDR-H1, comprising the amino acid sequence SEQ ID NO: 662, b. CDR-H2, comprising the amino acid sequence SEQ ID NO: 1204, and c. CDR-H3, comprising the amino acid sequence SEQ ID NO: 1746.

[1792] In one aspect, an antibody or antigen-binding fragment thereof is provided, wherein the antibody or antigen-binding fragment thereof comprises a light chain variable domain (VL) having at least 90%, 91%, 92%, 93%, 94%, 95%, 96%, 97%, 98%, 99%, or 100% sequence identity to the amino acid sequence SEQ ID NO: 391. In some embodiments, a VL sequence having at least 90%, 91%, 92%, 93%, 94%, 95%, 96%, 97%, 98%, or 99% identity contains substitutions (e.g., conservative substitutions), insertions, or deletions relative to the reference sequence, but an antibody or antigen-binding fragment thereof comprising that sequence retains the ability to bind to same antigen as the parent (e.g., cancer associated antigen). In some embodiments, a total of 1 to 10 amino acids have been substituted, inserted and/or deleted in the amino acid sequence SEQ ID NO: 391. In some embodiments, the substitutions, insertions, or deletions occur in regions outside the CDRs (e.g., in the FRs). Optionally, the antibody or antigen-binding fragment thereof comprises the VL sequence SEQ ID NO: 391, including one or more post-translational modifications of that sequence. In a particular embodiment, the VL comprises one, two or three CDRs selected from: a. CDR-L1, comprising the amino acid sequence SEQ ID NO: 933, b. CDR-L2, comprising the amino acid sequence SEQ ID NO: 1475, and c. CDR-L3, comprising the amino acid sequence SEQ ID NO: 2017.

[1793] In one aspect, an antibody or antigen-binding fragment thereof is provided, wherein the antibody or antigen-binding fragment thereof comprises a VH as in any of the embodiments provided above, and a VL as in any of the embodiments provided above. In some embodiments, the antibody or antigen-binding fragment thereof comprises the VH amino acid sequence of SEQ ID NO: 120, and the VL amino acid sequence of SEQ ID NO: 391, optionally including post-translational modifications of those sequences.

### TKIC1012

[1794] In one aspect, the present disclosure provides an antibody or antigen-binding fragment thereof comprising at least one or both variable regions selected from: a. VH comprising the amino acid sequence of SEQ ID NO: 121 and b. VL comprising the amino acid sequence of SEQ ID NO: 392.

[1795] In one aspect, the present disclosure provides an antibody or antigen-binding fragment thereof comprising at least one, two, three, four, five, or six CDRs selected from: a. CDR-H1 comprising the amino acid sequence of SEQ ID NO: 663, b. CDR-H2 comprising the amino acid sequence of SEQ ID NO: 1205, c. CDR-H3 comprising the amino acid sequence of SEQ ID NO: 1747, d. CDR-L1 comprising the amino acid sequence of SEQ ID NO: 934, e. CDR-L2 comprising the amino acid sequence of SEQ ID NO: 1476, and f. CDR-L3 comprising the amino acid sequence of SEQ ID NO: 2018.

[1796] In one aspect, the present disclosure provides an antibody or antigen-binding fragment thereof comprising a CDR-H3 comprising the amino acid sequence of SEQ ID NO: 1747, and a CDR-L3 comprising the amino acid sequence of SEQ ID NO: 2018.

[1797] In one aspect, the present disclosure provides an antibody or antigen-binding fragment thereof comprising at least one, at least two, or all three VH CDR sequences selected from: a. CDR-H1 comprising the amino acid sequence of SEQ ID NO: 663, b. CDR-H2 comprising the amino acid sequence of SEQ ID NO: 1205, c. CDR-H3 comprising the amino acid sequence of SEQ ID NO: 1747, and a VL comprising the amino acid sequence of SEQ ID NO: 392.

[1798] In one aspect, the present disclosure provides an antibody or antigen-binding fragment thereof comprising at least one, at least two, or all three VL CDR sequences selected from: a. CDR-L1 comprising the amino acid sequence of SEQ ID NO: 934, b. CDR-L2 comprising the amino acid sequence of SEQ ID NO: 1476, c. CDR-L3 comprising the amino acid sequence of SEQ ID NO: 2018, and a VH comprising the amino acid sequence of SEQ ID NO: 121.

[1799] In one aspect, an antibody or antigen-binding fragment thereof is provided, wherein the antibody or antigen-binding fragment thereof comprises a heavy chain variable domain (VH) having at least 90%, 91%, 92%, 93%, 94%, 95%, 96%, 97%, 98%, 99%, or 100% sequence identity to the amino acid sequence SEQ ID NO: 121. In some embodiments, a VH sequence having at least 90%, 91%, 92%, 93%, 94%, 95%, 96%, 97%, 98%, or 99% identity contains substitutions (e.g., conservative substitutions), insertions, or deletions relative to the reference sequence, but an antibody or antigen-binding fragment thereof comprising that sequence retains the ability to bind to same antigen as of the parent (e.g., cancer associated antigen). In some embodiments, a total of 1 to 10 amino acids have been substituted, inserted and/or deleted in the amino acid sequence SEQ ID NO: 121. In some embodiments, substitutions, insertions, or deletions occur in regions outside the CDRs (e.g., in the FRs). Optionally, the antibody or antigen-binding fragment thereof comprises the VH sequence SEQ ID NO: 121, including one or more post-translational modifications of that sequence. In a particular embodiment, the VH comprises one, two or three CDRs selected from: a. CDR-H1, comprising the amino acid sequence SEQ ID NO: 663, b. CDR-H2, comprising the amino acid sequence SEQ ID NO: 1205, and c. CDR-H3, comprising the amino acid sequence SEQ ID NO: 1747.

[1800] In one aspect, an antibody or antigen-binding fragment thereof is provided, wherein the antibody or antigen-binding fragment thereof comprises a light chain variable domain (VL) having at least 90%, 91%, 92%, 93%, 94%, 95%, 96%, 97%, 98%, 99%, or 100% sequence identity to the amino acid sequence SEQ ID NO: 392. In some embodiments, a VL sequence having at least 90%, 91%, 92%, 93%, 94%, 95%, 96%, 97%, 98%, or 99% identity contains substitutions (e.g., conservative substitutions), insertions, or deletions relative to the reference sequence, but an antibody or antigen-binding fragment thereof comprising that sequence retains the ability to bind to same antigen as the parent (e.g., cancer associated antigen). In some embodiments, a total of 1 to 10 amino acids have been substituted, inserted and/or deleted in the amino acid sequence SEQ ID NO: 392. In some embodiments, the substitutions, insertions, or deletions occur in regions outside the CDRs (e.g., in the FRs). Optionally, the antibody or antigen-binding fragment thereof comprises the VL sequence SEQ ID NO: 392, including one or more post-translational modifications of that sequence. In a particular embodiment, the VL comprises one, two or three CDRs selected from: a. CDR-L1, comprising the amino acid sequence SEQ ID NO: 934, b. CDR-L2, comprising the amino acid sequence SEQ ID NO: 1476, and c. CDR-L3, comprising the amino acid sequence SEQ ID NO: 2018.

[1801] In one aspect, an antibody or antigen-binding fragment thereof is provided, wherein the antibody or antigen-binding fragment thereof comprises a VH as in any of the embodiments provided above, and a VL as in any of the embodiments provided above. In some embodiments, the antibody or antigen-binding fragment thereof comprises the VH amino acid sequence of SEQ ID NO: 121, and the VL amino acid sequence of SEQ ID NO: 392, optionally including post-translational modifications of those sequences.

### TKIC1013

[1802] In one aspect, the present disclosure provides an antibody or antigen-binding fragment thereof comprising at least one or both variable regions selected from: a. VH comprising the amino acid sequence of SEQ ID NO: 122 and b. VL comprising the amino acid sequence of SEQ ID NO: 393.

[1803] In one aspect, the present disclosure provides an antibody or antigen-binding fragment thereof comprising at least one, two, three, four, five, or six CDRs selected from: a. CDR-H1 comprising the amino acid sequence of SEQ ID NO: 664, b. CDR-H2 comprising the amino acid sequence of SEQ ID NO: 1206, c. CDR-H3 comprising the amino acid sequence of SEQ ID NO: 1748, d. CDR-L1 comprising the amino acid sequence of SEQ ID NO: 935, e. CDR-L2 comprising the amino acid sequence of SEQ ID NO: 1477, and f. CDR-L3 comprising the amino acid sequence of SEQ ID NO: 2019.

[1804] In one aspect, the present disclosure provides an antibody or antigen-binding fragment thereof comprising a CDR-H3 comprising the amino acid sequence of SEQ ID NO: 1748, and a CDR-L3 comprising the amino acid sequence of SEQ ID NO: 2019.

[1805] In one aspect, the present disclosure provides an antibody or antigen-binding fragment thereof comprising at least one, at least two, or all three VH CDR sequences selected from: a. CDR-H1 comprising the amino acid sequence of SEQ ID NO: 664, b. CDR-H2 comprising the amino acid sequence of SEQ ID NO: 1206, c. CDR-H3 comprising the amino acid sequence of SEQ ID NO: 1748, and a VL comprising the amino acid sequence of SEQ ID NO: 393.

[1806] In one aspect, the present disclosure provides an antibody or antigen-binding fragment thereof comprising at least one, at least two, or all three VL CDR sequences selected from: a. CDR-L1 comprising the amino acid sequence of SEQ ID NO: 935, b. CDR-L2 comprising the amino acid sequence of SEQ ID NO: 1477, c. CDR-L3 comprising the amino acid sequence of SEQ ID NO: 2019, and a VH comprising the amino acid sequence of SEQ ID NO: 122.

[1807] In one aspect, an antibody or antigen-binding fragment thereof is provided, wherein the antibody or antigen-binding fragment thereof comprises a heavy chain variable domain (VH) having at least 90%, 91%, 92%, 93%, 94%, 95%, 96%, 97%, 98%, 99%, or 100% sequence identity to the amino acid sequence SEQ ID NO: 122. In some embodiments, a VH sequence having at least 90%, 91%, 92%, 93%, 94%, 95%, 96%, 97%, 98%, or 99% identity contains substitutions (e.g., conservative substitutions), insertions, or deletions relative to the reference sequence, but an antibody or antigen-binding fragment thereof comprising that sequence retains the ability to bind to same antigen as of the parent (e.g., cancer associated antigen). In some embodiments, a total of 1 to 10 amino acids have been substituted, inserted and/or deleted in the amino acid sequence SEQ ID NO: 122. In some embodiments, substitutions, insertions, or deletions occur in regions outside the CDRs (e.g., in the FRs). Optionally, the antibody or antigen-binding fragment thereof comprises the VH sequence SEQ ID NO: 122, including one or more post-translational modifications of that sequence. In a particular embodiment, the VH comprises one, two or three CDRs selected from: a. CDR-H1, comprising the amino acid sequence SEQ ID NO: 664, b. CDR-H2, comprising the amino acid sequence SEQ ID NO: 1206, and c. CDR-H3, comprising the amino acid sequence SEQ ID NO: 1748.

[1808] In one aspect, an antibody or antigen-binding fragment thereof is provided, wherein the antibody or antigen-binding fragment thereof comprises a light chain variable domain (VL) having at least 90%, 91%, 92%, 93%, 94%, 95%, 96%, 97%, 98%, 99%, or 100% sequence identity to the amino acid sequence SEQ ID NO: 393. In some embodiments, a VL sequence having at least 90%, 91%, 92%, 93%, 94%, 95%, 96%, 97%, 98%, or 99% identity contains substitutions (e.g., conservative substitutions), insertions, or deletions relative to the reference sequence, but an antibody or antigen-binding fragment thereof comprising that sequence retains the ability to bind to same antigen as the parent (e.g., cancer associated antigen). In some embodiments, a total of 1 to 10 amino acids have been substituted, inserted and/or deleted in the amino acid sequence SEQ ID NO: 393. In some embodiments, the substitutions, insertions, or deletions occur in regions outside the CDRs (e.g., in the FRs). Optionally, the antibody or antigen-binding fragment thereof comprises the VL sequence SEQ ID NO: 393, including one or more post-translational modifications of that sequence. In a particular embodiment, the VL comprises one, two or three CDRs selected from: a. CDR-L1, comprising the amino acid sequence SEQ ID NO: 935, b. CDR-L2, comprising the amino acid sequence SEQ ID NO: 1477, and c. CDR-L3, comprising the amino acid sequence SEQ ID NO: 2019.

[1809] In one aspect, an antibody or antigen-binding fragment thereof is provided, wherein the antibody or antigen-binding fragment thereof comprises a VH as in any of the embodiments provided above, and a VL as in any of the embodiments provided above. In some embodiments, the antibody or antigen-binding fragment thereof comprises the VH amino acid sequence of SEQ ID NO: 122, and the VL amino acid sequence of SEQ ID NO: 393, optionally including post-translational modifications of those sequences.

### TKIC1014

[1810] In one aspect, the present disclosure provides an antibody or antigen-binding fragment thereof comprising at least one or both variable regions selected from: a. VH comprising the amino acid sequence of SEQ ID NO: 123 and b. VL comprising the amino acid sequence of SEQ ID NO: 394.

[1811] In one aspect, the present disclosure provides an antibody or antigen-binding fragment thereof comprising at least one, two, three, four, five, or six CDRs selected from: a. CDR-H1 comprising the amino acid sequence of SEQ ID NO: 665, b. CDR-H2 comprising the amino acid sequence of SEQ ID NO: 1207, c. CDR-H3 comprising the amino acid sequence of SEQ ID NO: 1749, d. CDR-L1 comprising the amino acid sequence of SEQ ID NO: 936, e. CDR-L2 comprising the amino acid sequence of SEQ ID NO: 1478, and f. CDR-L3 comprising the amino acid sequence of SEQ ID NO: 2020.

[1812] In one aspect, the present disclosure provides an antibody or antigen-binding fragment thereof comprising a CDR-H3 comprising the amino acid sequence of SEQ ID NO: 1749, and a CDR-L3 comprising the amino acid sequence of SEQ ID NO: 2020.

[1813] In one aspect, the present disclosure provides an antibody or antigen-binding fragment thereof comprising at least one, at least two, or all three VH CDR sequences selected from: a CDR-H1 comprising the amino acid sequence of SEQ ID NO: 665, b. CDR-H2 comprising the amino acid sequence of SEQ ID NO: 1207, c. CDR-H3 comprising the amino acid sequence of SEQ ID NO: 1749, and a VL comprising the amino acid sequence of SEQ ID NO: 394.

[1814] In one aspect, the present disclosure provides an antibody or antigen-binding fragment thereof comprising at least one, at least two, or all three VL CDR sequences selected from: a. CDR-L1 comprising the amino acid sequence of SEQ ID NO: 936, b. CDR-L2 comprising the amino acid sequence of SEQ ID NO: 1478, c. CDR-L3 comprising the amino acid sequence of SEQ ID NO: 2020, and a VH comprising the amino acid sequence of SEQ ID NO: 123.

[1815] In one aspect, an antibody or antigen-binding fragment thereof is provided, wherein the antibody or antigen-binding fragment thereof comprises a heavy chain variable domain (VH) having at least 90%, 91%, 92%, 93%, 94%, 95%, 96%, 97%, 98%, 99%, or 100% sequence identity to the amino acid sequence SEQ ID NO: 123. In some embodiments, a VH sequence having at least 90%, 91%, 92%, 93%, 94%, 95%, 96%, 97%, 98%, or 99% identity contains substitutions (e.g., conservative substitutions), insertions, or deletions relative to the reference sequence, but an antibody or antigen-binding fragment thereof comprising that sequence retains the ability to bind to same antigen as of the parent (e.g., cancer associated antigen). In some embodiments, a total of 1 to 10 amino acids have been substituted, inserted and/or deleted in the amino acid sequence SEQ ID NO: 123. In some embodiments, substitutions, insertions, or deletions occur in regions outside the CDRs (e.g., in the FRs). Optionally, the antibody or antigen-binding fragment thereof comprises the VH sequence SEQ ID NO: 123, including one or more post-translational modifications of that sequence. In a particular embodiment, the VH comprises one, two or three CDRs selected from: a. CDR-H1, comprising the amino acid sequence SEQ ID NO: 665, b. CDR-H2, comprising the amino acid sequence SEQ ID NO: 1207, and c. CDR-H3, comprising the amino acid sequence SEQ ID NO: 1749.

[1816] In one aspect, an antibody or antigen-binding fragment thereof is provided, wherein the antibody or antigen-binding fragment thereof comprises a light chain variable domain (VL) having at least 90%, 91%, 92%, 93%, 94%, 95%, 96%, 97%, 98%, 99%, or 100% sequence identity to the amino acid sequence SEQ ID NO: 394. In some embodiments, a VL sequence having at least 90%, 91%, 92%, 93%, 94%, 95%, 96%, 97%, 98%, or 99% identity contains substitutions (e.g., conservative substitutions), insertions, or deletions relative to the reference sequence, but an antibody or antigen-binding fragment thereof comprising that sequence retains the ability to bind to same antigen as the parent (e.g., cancer associated antigen). In some embodiments, a total of 1 to 10 amino acids have been substituted, inserted and/or deleted in the amino acid sequence SEQ ID NO: 394. In some embodiments, the substitutions, insertions, or deletions occur in regions outside the CDRs (e.g., in the FRs). Optionally, the antibody or antigen-binding fragment thereof comprises the VL sequence SEQ ID NO: 394, including one or more post-translational modifications of that sequence. In a particular embodiment, the VL comprises one, two or three CDRs selected from: a. CDR-L1, comprising the amino acid sequence SEQ ID NO: 936, b. CDR-L2, comprising the amino acid sequence SEQ ID NO: 1478, and c. CDR-L3, comprising the amino acid sequence SEQ ID NO: 2020.

[1817] In one aspect, an antibody or antigen-binding fragment thereof is provided, wherein the antibody or antigen-binding fragment thereof comprises a VH as in any of the embodiments provided above, and a VL as in any of the embodiments provided above. In some embodiments, the antibody or antigen-binding fragment thereof comprises the VH amino acid sequence of SEQ ID NO: 123, and the VL amino acid sequence of SEQ ID NO: 394, optionally including post-translational modifications of those sequences.

### TKIC1015

[1818] In one aspect, the present disclosure provides an antibody or antigen-binding fragment thereof comprising at least one or both variable regions selected from: a. VH comprising the amino acid sequence of SEQ ID NO: 124 and b. VL comprising the amino acid sequence of SEQ ID NO: 395.

[1819] In one aspect, the present disclosure provides an antibody or antigen-binding fragment thereof comprising at least one, two, three, four, five, or six CDRs selected from: a. CDR-H1 comprising the amino acid sequence of SEQ ID NO: 666, b. CDR-H2 comprising the amino acid sequence of SEQ ID NO: 1208, c. CDR-H3 comprising the amino acid sequence of SEQ ID NO: 1750, d. CDR-L1 comprising the amino acid sequence of SEQ ID NO: 937, e. CDR-L2 comprising the amino acid sequence of SEQ ID NO: 1479, and f. CDR-L3 comprising the amino acid sequence of SEQ ID NO: 2021.

[1820] In one aspect, the present disclosure provides an antibody or antigen-binding fragment thereof comprising a CDR-H3 comprising the amino acid sequence of SEQ ID NO: 1750 and a CDR-L3 comprising the amino acid sequence of SEQ ID NO: 2021.

[1821] In one aspect, the present disclosure provides an antibody or antigen-binding fragment thereof comprising at least one, at least two, or all three VH CDR sequences selected from: a. CDR-H1 comprising the amino acid sequence of SEQ ID NO: 666, b. CDR-H2 comprising the amino acid sequence of SEQ ID NO: 1208, c. CDR-H3 comprising the amino acid sequence of SEQ ID NO: 1750, and a VL comprising the amino acid sequence of SEQ ID NO: 395.

[1822] In one aspect, the present disclosure provides an antibody or antigen-binding fragment thereof comprising at least one, at least two, or all three VL CDR sequences selected from: a. CDR-L1 comprising the amino acid sequence of SEQ ID NO: 937, b. CDR-L2 comprising the amino acid sequence of SEQ ID NO: 1479, c. CDR-L3 comprising the amino acid sequence of SEQ ID NO: 2021, and a VH comprising the amino acid sequence of SEQ ID NO: 124.

[1823] In one aspect, an antibody or antigen-binding fragment thereof is provided, wherein the antibody or antigen-binding fragment thereof comprises a heavy chain variable domain (VH) having at least 90%, 91%, 92%, 93%, 94%, 95%, 96%, 97%, 98%, 99%, or 100% sequence identity to the amino acid sequence SEQ ID NO: 124. In some embodiments, a VH sequence having at least 90%, 91%, 92%, 93%, 94%, 95%, 96%, 97%, 98%, or 99% identity contains substitutions (e.g., conservative substitutions), insertions, or deletions relative to the reference sequence, but an antibody or antigen-binding fragment thereof comprising that sequence retains the ability to bind to same antigen as of the parent (e.g., cancer associated antigen). In some embodiments, a total of 1 to 10 amino acids have been substituted, inserted and/or deleted in the amino acid sequence SEQ ID NO: 124. In some embodiments, substitutions, insertions, or deletions occur in regions outside the CDRs (e.g., in the FRs). Optionally, the antibody or antigen-binding fragment thereof comprises the VH sequence SEQ ID NO: 124, including one or more post-translational modifications of that sequence. In a particular embodiment, the VH comprises one, two or three CDRs selected from: a. CDR-H1, comprising the amino acid sequence SEQ ID NO: 666, b. CDR-H2, comprising the amino acid sequence SEQ ID NO: 1208, and c. CDR-H3, comprising the amino acid sequence SEQ ID NO: 1750.

[1824] In one aspect, an antibody or antigen-binding fragment thereof is provided, wherein the antibody or antigen-binding fragment thereof comprises a light chain variable domain (VL) having at least 90%, 91%, 92%, 93%, 94%, 95%, 96%, 97%, 98%, 99%, or 100% sequence identity to the amino acid sequence SEQ ID NO: 395. In some embodiments, a VL sequence having at least 90%, 91%, 92%, 93%, 94%, 95%, 96%, 97%, 98%, or 99% identity contains substitutions (e.g., conservative substitutions), insertions, or deletions relative to the reference sequence, but an antibody or antigen-binding fragment thereof comprising that sequence retains the ability to bind to same antigen as the parent (e.g., cancer associated antigen). In some embodiments, a total of 1 to 10 amino acids have been substituted, inserted and/or deleted in the amino acid sequence SEQ ID NO: 395. In some embodiments, the substitutions, insertions, or deletions occur in regions outside the CDRs (e.g., in the FRs). Optionally, the antibody or antigen-binding fragment thereof comprises the VL sequence SEQ ID NO: 395, including one or more post-translational modifications of that sequence. In a particular embodiment, the VL comprises one, two or three CDRs selected from: a. CDR-L1, comprising the amino acid sequence SEQ ID NO: 937, b. CDR-L2, comprising the amino acid sequence SEQ ID NO: 1479, and c. CDR-L3, comprising the amino acid sequence SEQ ID NO: 2021.

[1825] In one aspect, an antibody or antigen-binding fragment thereof is provided, wherein the antibody or antigen-binding fragment thereof comprises a VH as in any of the embodiments provided above, and a VL as in any of the embodiments provided above. In some embodiments, the antibody or antigen-binding fragment thereof comprises the VH amino acid sequence of SEQ ID NO: 124, and the VL amino acid sequence of SEQ ID NO: 395, optionally including post-translational modifications of those sequences.

### TKIC1016

[1826] In one aspect, the present disclosure provides an antibody or antigen-binding fragment thereof comprising at least one or both variable regions selected from: a. VH comprising the amino acid sequence of SEQ ID NO: 125 and b. VL comprising the amino acid sequence of SEQ ID NO: 396.

[1827] In one aspect, the present disclosure provides an antibody or antigen-binding fragment thereof comprising at least one, two, three, four, five, or six CDRs selected from: a. CDR-H1 comprising the amino acid sequence of SEQ ID NO: 667, b. CDR-H2 comprising the amino acid sequence of SEQ ID NO: 1209, c. CDR-H3 comprising the amino acid sequence of SEQ ID NO: 1751, d. CDR-L1 comprising the amino acid sequence of SEQ ID NO: 938, e. CDR-L2 comprising the amino acid sequence of SEQ ID NO: 1480, and f. CDR-L3 comprising the amino acid sequence of SEQ ID NO: 2022.

[1828] In one aspect, the present disclosure provides an antibody or antigen-binding fragment thereof comprising a CDR-H3 comprising the amino acid sequence of SEQ ID NO: 1751, and a CDR-L3 comprising the amino acid sequence of SEQ ID NO: 2022.

[1829] In one aspect, the present disclosure provides an antibody or antigen-binding fragment thereof comprising at least one, at least two, or all three VH CDR sequences selected from: a. CDR-H1 comprising the amino acid sequence of SEQ ID NO: 667, b. CDR-H2 comprising the amino acid sequence of SEQ ID NO: 1209, c. CDR-H3 comprising the amino acid sequence of SEQ ID NO: 1751, and a VL comprising the amino acid sequence of SEQ ID NO: 396.

[1830] In one aspect, the present disclosure provides an antibody or antigen-binding fragment thereof comprising at least one, at least two, or all three VL CDR sequences selected from: a. CDR-L1 comprising the amino acid sequence of SEQ ID NO: 938, b. CDR-L2 comprising the amino acid sequence of SEQ ID NO: 1480, c. CDR-L3 comprising the amino acid sequence of SEQ ID NO: 2022, and a VH comprising the amino acid sequence of SEQ ID NO: 125.

[1831] In one aspect, an antibody or antigen-binding fragment thereof is provided, wherein the antibody or antigen-binding fragment thereof comprises a heavy chain variable domain (VH) having at least 90%, 91%, 92%, 93%, 94%, 95%, 96%, 97%, 98%, 99%, or 100% sequence identity to the amino acid sequence SEQ ID NO: 125. In some embodiments, a VH sequence having at least 90%, 91%, 92%, 93%, 94%, 95%, 96%, 97%, 98%, or 99% identity contains substitutions (e.g., conservative substitutions), insertions, or deletions relative to the reference sequence, but an antibody or antigen-binding fragment thereof comprising that sequence retains the ability to bind to same antigen as of the parent (e.g., cancer associated antigen). In some embodiments, a total of 1 to 10 amino acids have been substituted, inserted and/or deleted in the amino acid sequence SEQ ID NO: 125. In some embodiments, substitutions, insertions, or deletions occur in regions outside the CDRs (e.g., in the FRs). Optionally, the antibody or antigen-binding fragment thereof comprises the VH sequence SEQ ID NO: 125, including one or more post-translational modifications of that sequence. In a particular embodiment, the VH comprises one, two or three CDRs selected from: a. CDR-H1, comprising the amino acid sequence SEQ ID NO: 667, b. CDR-H2, comprising the amino acid sequence SEQ ID NO: 1209, and c. CDR-H3, comprising the amino acid sequence SEQ ID NO: 1751.

[1832] In one aspect, an antibody or antigen-binding fragment thereof is provided, wherein the antibody or antigen-binding fragment thereof comprises a light chain variable domain (VL) having at least 90%, 91%, 92%, 93%, 94%, 95%, 96%, 97%, 98%, 99%, or 100% sequence identity to the amino acid sequence SEQ ID NO: 396. In some embodiments, a VL sequence having at least 90%, 91%, 92%, 93%, 94%, 95%, 96%, 97%, 98%, or 99% identity contains substitutions (e.g., conservative substitutions), insertions, or deletions relative to the reference sequence, but an antibody or antigen-binding fragment thereof comprising that sequence retains the ability to bind to same antigen as the parent (e.g., cancer associated antigen). In some embodiments, a total of 1 to 10 amino acids have been substituted, inserted and/or deleted in the amino acid sequence SEQ ID NO: 396. In some embodiments, the substitutions, insertions, or deletions occur in regions outside the CDRs (e.g., in the FRs). Optionally, the antibody or antigen-binding fragment thereof comprises the VL sequence SEQ ID NO: 396, including one or more post-translational modifications of that sequence. In a particular embodiment, the VL comprises one, two or three CDRs selected from: a. CDR-L1, comprising the amino acid sequence SEQ ID NO: 938, b. CDR-L2, comprising the amino acid sequence SEQ ID NO: 1480, and c. CDR-L3, comprising the amino acid sequence SEQ ID NO: 2022.

[1833] In one aspect, an antibody or antigen-binding fragment thereof is provided, wherein the antibody or antigen-binding fragment thereof comprises a VH as in any of the embodiments provided above, and a VL as in any of the embodiments provided above. In some embodiments, the antibody or antigen-binding fragment thereof comprises the VH amino acid sequence of SEQ ID NO: 125, and the VL amino acid sequence of SEQ ID NO: 396, optionally including post-translational modifications of those sequences.

[1834] TKIC1017

[1835] In one aspect, the present disclosure provides an antibody or antigen-binding fragment thereof comprising at least one or both variable regions selected from: a. VH comprising the amino acid sequence of SEQ ID NO: 126 and b. VL comprising the amino acid sequence of SEQ ID NO: 397.

[1836] In one aspect, the present disclosure provides an antibody or antigen-binding fragment thereof comprising at least one, two, three, four, five, or six CDRs selected from: a. CDR-H1 comprising the amino acid sequence of SEQ ID NO: 668, b. CDR-H2 comprising the amino acid sequence of SEQ ID NO: 1210, c. CDR-H3 comprising the amino acid sequence of SEQ ID NO: 1752, d. CDR-L1 comprising the amino acid sequence of SEQ ID NO: 939, e. CDR-L2 comprising the amino acid sequence of SEQ ID NO: 1481, and f. CDR-L3 comprising the amino acid sequence of SEQ ID NO: 2023.

[1837] In one aspect, the present disclosure provides an antibody or antigen-binding fragment thereof comprising a CDR-H3 comprising the amino acid sequence of SEQ ID NO: 1752, and a CDR-L3 comprising the amino acid sequence of SEQ ID NO: 2023.

[1838] In one aspect, the present disclosure provides an antibody or antigen-binding fragment thereof comprising at least one, at least two, or all three VH CDR sequences selected from: a. CDR-H1 comprising the amino acid sequence of SEQ ID NO: 668, b. CDR-H2 comprising the amino acid sequence of SEQ ID NO: 1210, c. CDR-H3 comprising the amino acid sequence of SEQ ID NO: 1752, and a VL comprising the amino acid sequence of SEQ ID NO: 397.

[1839] In one aspect, the present disclosure provides an antibody or antigen-binding fragment thereof comprising at least one, at least two, or all three VL CDR sequences selected from: a. CDR-L1 comprising the amino acid sequence of SEQ ID NO: 939, b. CDR-L2 comprising the amino acid sequence of SEQ ID NO: 1481, c. CDR-L3 comprising the amino acid sequence of SEQ ID NO: 2023, and a VH comprising the amino acid sequence of SEQ ID NO: 126.

[1840] In one aspect, an antibody or antigen-binding fragment thereof is provided, wherein the antibody or antigen-binding fragment thereof comprises a heavy chain variable domain (VH) having at least 90%, 91%, 92%, 93%, 94%, 95%, 96%, 97%, 98%, 99%, or 100% sequence identity to the amino acid sequence SEQ ID NO: 126. In some embodiments, a VH sequence having at least 90%, 91%, 92%, 93%, 94%, 95%, 96%, 97%, 98%, or 99% identity contains substitutions (e.g., conservative substitutions), insertions, or deletions relative to the reference sequence, but an antibody or antigen-binding fragment thereof comprising that sequence retains the ability to bind to same antigen as of the parent (e.g., cancer associated antigen). In some embodiments, a total of 1 to 10 amino acids have been substituted, inserted and/or deleted in the amino acid sequence SEQ ID NO: 126. In some embodiments, substitutions, insertions, or deletions occur in regions outside the CDRs (e.g., in the FRs). Optionally, the antibody or antigen-binding fragment thereof comprises the VH sequence SEQ ID NO: 126, including one or more post-translational modifications of that sequence. In a particular embodiment, the VH comprises one, two or three CDRs selected from: a. CDR-H1, comprising the amino acid sequence SEQ ID NO: 668, b. CDR-H2, comprising the amino acid sequence SEQ ID NO: 1210, and c. CDR-H3, comprising the amino acid sequence SEQ ID NO: 1752.

[1841] In one aspect, an antibody or antigen-binding fragment thereof is provided, wherein the antibody or antigen-binding fragment thereof comprises a light chain variable domain (VL) having at least 90%, 91%, 92%, 93%, 94%, 95%, 96%, 97%, 98%, 99%, or 100% sequence identity to the amino acid sequence SEQ ID NO: 397. In some embodiments, a VL sequence having at least 90%, 91%, 92%, 93%, 94%, 95%, 96%, 97%, 98%, or 99% identity contains substitutions (e.g., conservative substitutions), insertions, or deletions relative to the reference sequence, but an antibody or antigen-binding fragment thereof comprising that sequence retains the ability to bind to same antigen as the parent (e.g., cancer associated antigen). In some embodiments, a total of 1 to 10 amino acids have been substituted, inserted and/or deleted in the amino acid sequence SEQ ID NO: 397. In some embodiments, the substitutions, insertions, or deletions occur in regions outside the CDRs (e.g., in the FRs). Optionally, the antibody or antigen-binding fragment thereof comprises the VL sequence SEQ ID NO: 397, including one or more post-translational modifications of that sequence. In a particular embodiment, the VL comprises one, two or three CDRs selected from: a. CDR-L1, comprising the amino acid sequence SEQ ID NO: 939, b. CDR-L2, comprising the amino acid sequence SEQ ID NO: 1481, and b. CDR-L3, comprising the amino acid sequence SEQ ID NO: 2023.

[1842] In one aspect, an antibody or antigen-binding fragment thereof is provided, wherein the antibody or antigen-binding fragment thereof comprises a VH as in any of the embodiments provided above, and a VL as in any of the embodiments provided above. In some embodiments, the antibody or antigen-binding fragment thereof comprises the VH amino acid sequence of SEQ ID NO: 126, and the VL amino acid sequence of SEQ ID NO: 397, optionally including post-translational modifications of those sequences.

### TKIC1018

[1843] In one aspect, the present disclosure provides an antibody or antigen-binding fragment thereof comprising at least one or both variable regions selected from: a. VH comprising the amino acid sequence of SEQ ID NO: 127 and b. VL comprising the amino acid sequence of SEQ ID NO: 398.

[1844] In one aspect, the present disclosure provides an antibody or antigen-binding fragment thereof comprising at least one, two, three, four, five, or six CDRs selected from: a. CDR-H1 comprising the amino acid sequence of SEQ ID NO: 669, b. CDR-H2 comprising the amino acid sequence of SEQ ID NO: 1211, c. CDR-H3 comprising the amino acid sequence of SEQ ID NO: 1753, d. CDR-L1 comprising the amino acid sequence of SEQ ID NO: 940, e. CDR-L2 comprising the amino acid sequence of SEQ ID NO: 1482, and f. CDR-L3 comprising the amino acid sequence of SEQ ID NO: 2024.

[1845] In one aspect, the present disclosure provides an antibody or antigen-binding fragment thereof comprising a CDR-H3 comprising the amino acid sequence of SEQ ID NO: 1753, and a CDR-L3 comprising the amino acid sequence of SEQ ID NO: 2024.

[1846] In one aspect, the present disclosure provides an antibody or antigen-binding fragment thereof comprising at least one, at least two, or all three VH CDR sequences selected from: a. CDR-H1 comprising the amino acid sequence of SEQ ID NO: 669, b. CDR-H2 comprising the amino acid sequence of SEQ ID NO: 1211, c. CDR-H3 comprising the amino acid sequence of SEQ ID NO: 1753, and a VL comprising the amino acid sequence of SEQ ID NO: 398.

[1847] In one aspect, the present disclosure provides an antibody or antigen-binding fragment thereof comprising at least one, at least two, or all three VL CDR sequences selected from: a. CDR-L1 comprising the amino acid sequence of SEQ ID NO: 940, b. CDR-L2 comprising the amino acid sequence of SEQ ID NO: 1482, c. CDR-L3 comprising the amino acid sequence of SEQ ID NO: 2024, and a VH comprising the amino acid sequence of SEQ ID NO: 127.

[1848] In one aspect, an antibody or antigen-binding fragment thereof is provided, wherein the antibody or antigen-binding fragment thereof comprises a heavy chain variable domain (VH) having at least 90%, 91%, 92%, 93%, 94%, 95%, 96%, 97%, 98%, 99%, or 100% sequence identity to the amino acid sequence SEQ ID NO: 127. In some embodiments, a VH sequence having at least 90%, 91%, 92%, 93%, 94%, 95%, 96%, 97%, 98%, or 99% identity contains substitutions (e.g., conservative substitutions), insertions, or deletions relative to the reference sequence, but an antibody or antigen-binding fragment thereof comprising that sequence retains the ability to bind to same antigen as of the parent (e.g., cancer associated antigen). In some embodiments, a total of 1 to 10 amino acids have been substituted, inserted and/or deleted in the amino acid sequence SEQ ID NO: 127. In some embodiments, substitutions, insertions, or deletions occur in regions outside the CDRs (e.g., in the FRs). Optionally, the antibody or antigen-binding fragment thereof comprises the VH sequence SEQ ID NO: 127, including one or more post-translational modifications of that sequence. In a particular embodiment, the VH comprises one, two or three CDRs selected from: a. CDR-H1, comprising the amino acid sequence SEQ ID NO: 669, b. CDR-H2, comprising the amino acid sequence SEQ ID NO: 1211, and c. CDR-H3, comprising the amino acid sequence SEQ ID NO: 1753.

[1849] In one aspect, an antibody or antigen-binding fragment thereof is provided, wherein the antibody or antigen-binding fragment thereof comprises a light chain variable domain (VL) having at least 90%, 91%, 92%, 93%, 94%, 95%, 96%, 97%, 98%, 99%, or 100% sequence identity to the amino acid sequence SEQ ID NO: 398. In some embodiments, a VL sequence having at least 90%, 91%, 92%, 93%, 94%, 95%, 96%, 97%, 98%, or 99% identity contains substitutions (e.g., conservative substitutions), insertions, or deletions relative to the reference sequence, but an antibody or antigen-binding fragment thereof comprising that sequence retains the ability to bind to same antigen as the parent (e.g., cancer associated antigen). In some embodiments, a total of 1 to 10 amino acids have been substituted, inserted and/or deleted in the amino acid sequence SEQ ID NO: 398. In some embodiments, the substitutions, insertions, or deletions occur in regions outside the CDRs (e.g., in the FRs). Optionally, the antibody or antigen-binding fragment thereof comprises the VL sequence SEQ ID NO: 398, including one or more post-translational modifications of that sequence. In a particular embodiment, the VL comprises one, two or three CDRs selected from: a. CDR-L1, comprising the amino acid sequence SEQ ID NO: 940, b. CDR-L2, comprising the amino acid sequence SEQ ID NO: 1482, and c. CDR-L3, comprising the amino acid sequence SEQ ID NO: 2024.

[1850] In one aspect, an antibody or antigen-binding fragment thereof is provided, wherein the antibody or antigen-binding fragment thereof comprises a VH as in any of the embodiments provided above, and a VL as in any of the embodiments provided above. In some embodiments, the antibody or antigen-binding fragment thereof comprises the VH amino acid sequence of SEQ ID NO: 127, and the VL amino acid sequence of SEQ ID NO: 398, optionally including post-translational modifications of those sequences.

### TKIC1019

[1851] In one aspect, the present disclosure provides an antibody or antigen-binding fragment thereof comprising at least one or both variable regions selected from: a. VH comprising the amino acid sequence of SEQ ID NO: 128 and b. VL comprising the amino acid sequence of SEQ ID NO: 399.

[1852] In one aspect, the present disclosure provides an antibody or antigen-binding fragment thereof comprising at least one, two, three, four, five, or six CDRs selected from: a. CDR-H1 comprising the amino acid sequence of SEQ ID NO: 670, b. CDR-H2 comprising the amino acid sequence of SEQ ID NO: 1212, c. CDR-H3 comprising the amino acid sequence of SEQ ID NO: 1754, d. CDR-L1 comprising the amino acid sequence of SEQ ID NO: 941, e. CDR-L2 comprising the amino acid sequence of SEQ ID NO: 1483, and f. CDR-L3 comprising the amino acid sequence of SEQ ID NO: 2025.

[1853] In one aspect, the present disclosure provides an antibody or antigen-binding fragment thereof comprising a CDR-H3 comprising the amino acid sequence of SEQ ID NO: 1754, and a CDR-L3 comprising the amino acid sequence of SEQ ID NO: 2025.

[1854] In one aspect, the present disclosure provides an antibody or antigen-binding fragment thereof comprising at least one, at least two, or all three VH CDR sequences selected from: a. CDR-H1 comprising the amino acid sequence of SEQ ID NO: 670, b. CDR-H2 comprising the amino acid sequence of SEQ ID NO: 1212, c. CDR-H3 comprising the amino acid sequence of SEQ ID NO: 1754, and a VL comprising the amino acid sequence of SEQ ID NO: 399.

[1855] In one aspect, the present disclosure provides an antibody or antigen-binding fragment thereof comprising at least one, at least two, or all three VL CDR sequences selected from: a. CDR-L1 comprising the amino acid sequence of SEQ ID NO: 941, b. CDR-L2 comprising the amino acid sequence of SEQ ID NO: 1483, c. CDR-L3 comprising the amino acid sequence of SEQ ID NO: 2025, and a VH comprising the amino acid sequence of SEQ ID NO: 128.

[1856] In one aspect, an antibody or antigen-binding fragment thereof is provided, wherein the antibody or antigen-binding fragment thereof comprises a heavy chain variable domain (VH) having at least 90%, 91%, 92%, 93%, 94%, 95%, 96%, 97%, 98%, 99%, or 100% sequence identity to the amino acid sequence SEQ ID NO: 128. In some embodiments, a VH sequence having at least 90%, 91%, 92%, 93%, 94%, 95%, 96%, 97%, 98%, or 99% identity contains substitutions (e.g., conservative substitutions), insertions, or deletions relative to the reference sequence, but an antibody or antigen-binding fragment thereof comprising that sequence retains the ability to bind to same antigen as of the parent (e.g., cancer associated antigen). In some embodiments, a total of 1 to 10 amino acids have been substituted, inserted and/or deleted in the amino acid sequence SEQ ID NO: 128. In some embodiments, substitutions, insertions, or deletions occur in regions outside the CDRs (e.g., in the FRs). Optionally, the antibody or antigen-binding fragment thereof comprises the VH sequence SEQ ID NO: 128, including one or more post-translational modifications of that sequence. In a particular embodiment, the VH comprises one, two or three CDRs selected from: a. CDR-H1, comprising the amino acid sequence SEQ ID NO: 670, b. CDR-H2, comprising the amino acid sequence SEQ ID NO: 1212, and c. CDR-H3, comprising the amino acid sequence SEQ ID NO: 1754.

[1857] In one aspect, an antibody or antigen-binding fragment thereof is provided, wherein the antibody or antigen-binding fragment thereof comprises a light chain variable domain (VL) having at least 90%, 91%, 92%, 93%, 94%, 95%, 96%, 97%, 98%, 99%, or 100% sequence identity to the amino acid sequence SEQ ID NO: 399. In some embodiments, a VL sequence having at least 90%, 91%, 92%, 93%, 94%, 95%, 96%, 97%, 98%, or 99% identity contains substitutions (e.g., conservative substitutions), insertions, or deletions relative to the reference sequence, but an antibody or antigen-binding fragment thereof comprising that sequence retains the ability to bind to same antigen as the parent (e.g., cancer associated antigen). In some embodiments, a total of 1 to 10 amino acids have been substituted, inserted and/or deleted in the amino acid sequence SEQ ID NO: 399. In some embodiments, the substitutions, insertions, or deletions occur in regions outside the CDRs (e.g., in the FRs). Optionally, the antibody or antigen-binding fragment thereof comprises the VL sequence SEQ ID NO: 399, including one or more post-translational modifications of that sequence. In a particular embodiment, the VL comprises one, two or three CDRs selected from: a. CDR-L1, comprising the amino acid sequence SEQ ID NO: 941, b. CDR-L2, comprising the amino acid sequence SEQ ID NO: 1483, and c. CDR-L3, comprising the amino acid sequence SEQ ID NO: 2025.

[1858] In one aspect, an antibody or antigen-binding fragment thereof is provided, wherein the antibody or antigen-binding fragment thereof comprises a VH as in any of the embodiments provided above, and a VL as in any of the embodiments provided above. In some embodiments, the antibody or antigen-binding fragment thereof comprises the VH amino acid sequence of SEQ ID NO: 128, and the VL amino acid sequence of SEQ ID NO: 399, optionally including post-translational modifications of those sequences.

### TKIC1020

[1859] In one aspect, the present disclosure provides an antibody or antigen-binding fragment thereof comprising at least one or both variable regions selected from: a. VH comprising the amino acid sequence of SEQ ID NO: 129 and b. VL comprising the amino acid sequence of SEQ ID NO: 400.

[1860] In one aspect, the present disclosure provides an antibody or antigen-binding fragment thereof comprising at least one, two, three, four, five, or six CDRs selected from: a. CDR-H1 comprising the amino acid sequence of SEQ ID NO: 671, b. CDR-H2 comprising the amino acid sequence of SEQ ID NO: 1213, c. CDR-H3 comprising the amino acid sequence of SEQ ID NO: 1755, d. CDR-L1 comprising the amino acid sequence of SEQ ID NO: 942, e. CDR-L2 comprising the amino acid sequence of SEQ ID NO: 1484, and f. CDR-L3 comprising the amino acid sequence of SEQ ID NO: 2026.

[1861] In one aspect, the present disclosure provides an antibody or antigen-binding fragment thereof comprising a CDR-H3 comprising the amino acid sequence of SEQ ID NO: 1755, and a CDR-L3 comprising the amino acid sequence of SEQ ID NO: 2026.

[1862] In one aspect, the present disclosure provides an antibody or antigen-binding fragment thereof comprising at least one, at least two, or all three VH CDR sequences selected from: a. CDR-H1 comprising the amino acid sequence of SEQ ID NO: 671, b. CDR-H2 comprising the amino acid sequence of SEQ ID NO: 1213, c. CDR-H3 comprising the amino acid sequence of SEQ ID NO: 1755, and a VL comprising the amino acid sequence of SEQ ID NO: 400.

[1863] In one aspect, the present disclosure provides an antibody or antigen-binding fragment thereof comprising at least one, at least two, or all three VL CDR sequences selected from: a. CDR-L1 comprising the amino acid sequence of SEQ ID NO: 942, b. CDR-L2 comprising the amino acid sequence of SEQ ID NO: 1484, c. CDR-L3 comprising the amino acid sequence of SEQ ID NO: 2026, and a VH comprising the amino acid sequence of SEQ ID NO: 129.

[1864] In one aspect, an antibody or antigen-binding fragment thereof is provided, wherein the antibody or antigen-binding fragment thereof comprises a heavy chain variable domain (VH) having at least 90%, 91%, 92%, 93%, 94%, 95%, 96%, 97%, 98%, 99%, or 100% sequence identity to the amino acid sequence SEQ ID NO: 129. In some embodiments, a VH sequence having at least 90%, 91%, 92%, 93%, 94%, 95%, 96%, 97%, 98%, or 99% identity contains substitutions (e.g., conservative substitutions), insertions, or deletions relative to the reference sequence, but an antibody or antigen-binding fragment thereof comprising that sequence retains the ability to bind to same antigen as of the parent (e.g., cancer associated antigen). In some embodiments, a total of 1 to 10 amino acids have been substituted, inserted and/or deleted in the amino acid sequence SEQ ID NO: 129. In some embodiments, substitutions, insertions, or deletions occur in regions outside the CDRs (e.g., in the FRs). Optionally, the antibody or antigen-binding fragment thereof comprises the VH sequence SEQ ID NO: 129, including one or more post-translational modifications of that sequence. In a particular embodiment, the VH comprises one, two or three CDRs selected from: a. CDR-H1, comprising the amino acid sequence SEQ ID NO: 671, b. CDR-H2, comprising the amino acid sequence SEQ ID NO: 1213, and c. CDR-H3, comprising the amino acid sequence SEQ ID NO: 1755.

[1865] In one aspect, an antibody or antigen-binding fragment thereof is provided, wherein the antibody or antigen-binding fragment thereof comprises a light chain variable domain (VL) having at least 90%, 91%, 92%, 93%, 94%, 95%, 96%, 97%, 98%, 99%, or 100% sequence identity to the amino acid sequence SEQ ID NO: 400. In some embodiments, a VL sequence having at least 90%, 91%, 92%, 93%, 94%, 95%, 96%, 97%, 98%, or 99% identity contains substitutions (e.g., conservative substitutions), insertions, or deletions relative to the reference sequence, but an antibody or antigen-binding fragment thereof comprising that sequence retains the ability to bind to same antigen as the parent (e.g., cancer associated antigen). In some embodiments, a total of 1 to 10 amino acids have been substituted, inserted and/or deleted in the amino acid sequence SEQ ID NO: 400. In some embodiments, the substitutions, insertions, or deletions occur in regions outside the CDRs (e.g., in the FRs). Optionally, the antibody or antigen-binding fragment thereof comprises the VL sequence SEQ ID NO: 400, including one or more post-translational modifications of that sequence. In a particular embodiment, the VL comprises one, two or three CDRs selected from: a. CDR-L1, comprising the amino acid sequence SEQ ID NO: 942, b. CDR-L2, comprising the amino acid sequence SEQ ID NO: 1484, and c. CDR-L3, comprising the amino acid sequence SEQ ID NO: 2026.

[1866] In one aspect, an antibody or antigen-binding fragment thereof is provided, wherein the antibody or antigen-binding fragment thereof comprises a VH as in any of the embodiments provided above, and a VL as in any of the embodiments provided above. In some embodiments, the antibody or antigen-binding fragment thereof comprises the VH amino acid sequence of SEQ ID NO: 129, and the VL amino acid sequence of SEQ ID NO: 400, optionally including post-translational modifications of those sequences.

### TKIP1001

[1867] In one aspect, the present disclosure provides an antibody or antigen-binding fragment thereof comprising at least one or both variable regions selected from: a. VH comprising the amino acid sequence of SEQ ID NO: 130 and b. VL comprising the amino acid sequence of SEQ ID NO: 401.

[1868] In one aspect, the present disclosure provides an antibody or antigen-binding fragment thereof comprising at least one, two, three, four, five, or six CDRs selected from: a. CDR-H1 comprising the amino acid sequence of SEQ ID NO: 672, b. CDR-H2 comprising the amino acid sequence of SEQ ID NO: 1214, c. CDR-H3 comprising the amino acid sequence of SEQ ID NO: 1756, d. CDR-L1 comprising the amino acid sequence of SEQ ID NO: 943, e. CDR-L2 comprising the amino acid sequence of SEQ ID NO: 1485, and f. CDR-L3 comprising the amino acid sequence of SEQ ID NO: 2027.

[1869] In one aspect, the present disclosure provides an antibody or antigen-binding fragment thereof comprising a CDR-H3 comprising the amino acid sequence of SEQ ID NO: 1756, and a CDR-L3 comprising the amino acid sequence of SEQ ID NO: 2027.

[1870] In one aspect, the present disclosure provides an antibody or antigen-binding fragment thereof comprising at least one, at least two, or all three VH CDR sequences selected from: a. CDR-H1 comprising the amino acid sequence of SEQ ID NO: 672, b. CDR-H2 comprising the amino acid sequence of SEQ ID NO: 1214, c. CDR-H3 comprising the amino acid sequence of SEQ ID NO: 1756, and a VL comprising the amino acid sequence of SEQ ID NO: 401.

[1871] In one aspect, the present disclosure provides an antibody or antigen-binding fragment thereof comprising at least one, at least two, or all three VL CDR sequences selected from: a. CDR-L1 comprising the amino acid sequence of SEQ ID NO: 943, b. CDR-L2 comprising the amino acid sequence of SEQ ID NO: 1485, c. CDR-L3 comprising the amino acid sequence of SEQ ID NO: 2027, and a VH comprising the amino acid sequence of SEQ ID NO: 130.

[1872] In one aspect, an antibody or antigen-binding fragment thereof is provided, wherein the antibody or antigen-binding fragment thereof comprises a heavy chain variable domain (VH) having at least 90%, 91%, 92%, 93%, 94%, 95%, 96%, 97%, 98%, 99%, or 100% sequence identity to the amino acid sequence SEQ ID NO: 130. In some embodiments, a VH sequence having at least 90%, 91%, 92%, 93%, 94%, 95%, 96%, 97%, 98%, or 99% identity contains substitutions (e.g., conservative substitutions), insertions, or deletions relative to the reference sequence, but an antibody or antigen-binding fragment thereof comprising that sequence retains the ability to bind to same antigen as of the parent (e.g., cancer associated antigen). In some embodiments, a total of 1 to 10 amino acids have been substituted, inserted and/or deleted in the amino acid sequence SEQ ID NO: 130. In some embodiments, substitutions, insertions, or deletions occur in regions outside the CDRs (e.g., in the FRs). Optionally, the antibody or antigen-binding fragment thereof comprises the VH sequence SEQ ID NO: 130, including one or more post-translational modifications of that sequence. In a particular embodiment, the VH comprises one, two or three CDRs selected from: a. CDR-H1, comprising the amino acid sequence SEQ ID NO: 672, b. CDR-H2, comprising the amino acid sequence SEQ ID NO: 1214, and c. CDR-H3, comprising the amino acid sequence SEQ ID NO: 1756.

[1873] In one aspect, an antibody or antigen-binding fragment thereof is provided, wherein the antibody or antigen-binding fragment thereof comprises a light chain variable domain (VL) having at least 90%, 91%, 92%, 93%, 94%, 95%, 96%, 97%, 98%, 99%, or 100% sequence identity to the amino acid sequence SEQ ID NO: 401. In some embodiments, a VL sequence having at least 90%, 91%, 92%, 93%, 94%, 95%, 96%, 97%, 98%, or 99% identity contains substitutions (e.g., conservative substitutions), insertions, or deletions relative to the reference sequence, but an antibody or antigen-binding fragment thereof comprising that sequence retains the ability to bind to same antigen as the parent (e.g., cancer associated antigen). In some embodiments, a total of 1 to 10 amino acids have been substituted, inserted and/or deleted in the amino acid sequence SEQ ID NO: 401. In some embodiments, the substitutions, insertions, or deletions occur in regions outside the CDRs (e.g., in the FRs). Optionally, the antibody or antigen-binding fragment thereof comprises the VL sequence SEQ ID NO: 401, including one or more post-translational modifications of that sequence. In a particular embodiment, the VL comprises one, two or three CDRs selected from: a. CDR-L1, comprising the amino acid sequence SEQ ID NO: 943, b. CDR-L2, comprising the amino acid sequence SEQ ID NO: 1485, and c. CDR-L3, comprising the amino acid sequence SEQ ID NO: 2027.

[1874] In one aspect, an antibody or antigen-binding fragment thereof is provided, wherein the antibody or antigen-binding fragment thereof comprises a VH as in any of the embodiments provided above, and a VL as in any of the embodiments provided above. In some embodiments, the antibody or antigen-binding fragment thereof comprises the VH amino acid sequence of SEQ ID NO: 130, and the VL amino acid sequence of SEQ ID NO: 401, optionally including post-translational modifications of those sequences.

### TKIP1002

[1875] In one aspect, the present disclosure provides an antibody or antigen-binding fragment thereof comprising at least one or both variable regions selected from: a. VH comprising the amino acid sequence of SEQ ID NO: 131 and b. VL comprising the amino acid sequence of SEQ ID NO: 402.

[1876] In one aspect, the present disclosure provides an antibody or antigen-binding fragment thereof comprising at least one, two, three, four, five, or six CDRs selected from: a. CDR-H1 comprising the amino acid sequence of SEQ ID NO: 673, b. CDR-H2 comprising the amino acid sequence of SEQ ID NO: 1215, c. CDR-H3 comprising the amino acid sequence of SEQ ID NO: 1757, d. CDR-L1 comprising the amino acid sequence of SEQ ID NO: 944, e. CDR-L2 comprising the amino acid sequence of SEQ ID NO: 1486, and f. CDR-L3 comprising the amino acid sequence of SEQ ID NO: 2028.

[1877] In one aspect, the present disclosure provides an antibody or antigen-binding fragment thereof comprising at least one, at least two, or all three VH CDR sequences selected from: a. CDR-H1 comprising the amino acid sequence of SEQ ID NO: 673, b. CDR-H2 comprising the amino acid sequence of SEQ ID NO: 1215, c. CDR-H3 comprising the amino acid sequence of SEQ ID NO: 1757, and a VL comprising the amino acid sequence of SEQ ID NO: 402.

[1878] In one aspect, the present disclosure provides an antibody or antigen-binding fragment thereof comprising at least one, at least two, or all three VL CDR sequences selected from: a. CDR-L1 comprising the amino acid sequence of SEQ ID NO: 944, b. CDR-L2 comprising the amino acid sequence of SEQ ID NO: 1486, c. CDR-L3 comprising the amino acid sequence of SEQ ID NO: 2028, and a VH comprising the amino acid sequence of SEQ ID NO: 131.

[1879] In one aspect, an antibody or antigen-binding fragment thereof is provided, wherein the antibody or antigen-binding fragment thereof comprises a heavy chain variable domain (VH) having at least 90%, 91%, 92%, 93%, 94%, 95%, 96%, 97%, 98%, 99%, or 100% sequence identity to the amino acid sequence SEQ ID NO: 131. In some embodiments, a VH sequence having at least 90%, 91%, 92%, 93%, 94%, 95%, 96%, 97%, 98%, or 99% identity contains substitutions (e.g., conservative substitutions), insertions, or deletions relative to the reference sequence, but an antibody or antigen-binding fragment thereof comprising that sequence retains the ability to bind to same antigen as of the parent (e.g., cancer associated antigen). In some embodiments, a total of 1 to 10 amino acids have been substituted, inserted and/or deleted in the amino acid sequence SEQ ID NO: 131. In some embodiments, substitutions, insertions, or deletions occur in regions outside the CDRs (e.g., in the FRs). Optionally, the antibody or antigen-binding fragment thereof comprises the VH sequence SEQ ID NO: 131, including one or more post-translational modifications of that sequence. In a particular embodiment, the VH comprises one, two or three CDRs selected from: a. CDR-H1, comprising the amino acid sequence SEQ ID NO: 673, b. CDR-H2, comprising the amino acid sequence SEQ ID NO: 1215, and c. CDR-H3, comprising the amino acid sequence SEQ ID NO: 1757.

[1880] In one aspect, an antibody or antigen-binding fragment thereof is provided, wherein the antibody or antigen-binding fragment thereof comprises a light chain variable domain (VL) having at least 90%, 91%, 92%, 93%, 94%, 95%, 96%, 97%, 98%, 99%, or 100% sequence identity to the amino acid sequence SEQ ID NO: 402. In some embodiments, a VL sequence having at least 90%, 91%, 92%, 93%, 94%, 95%, 96%, 97%, 98%, or 99% identity contains substitutions (e.g., conservative substitutions), insertions, or deletions relative to the reference sequence, but an antibody or antigen-binding fragment thereof comprising that sequence retains the ability to bind to same antigen as the parent (e.g., cancer associated antigen). In some embodiments, a total of 1 to 10 amino acids have been substituted, inserted and/or deleted in the amino acid sequence SEQ ID NO: 402. In some embodiments, the substitutions, insertions, or deletions occur in regions outside the CDRs (e.g., in the FRs). Optionally, the antibody or antigen-binding fragment thereof comprises the VL sequence SEQ ID NO: 402, including one or more post-translational modifications of that sequence. In a particular embodiment, the VL comprises one, two or three CDRs selected from: a. CDR-L1, comprising the amino acid sequence SEQ ID NO: 944, b. CDR-L2, comprising the amino acid sequence SEQ ID NO: 1486, and c. CDR-L3, comprising the amino acid sequence SEQ ID NO: 2028.

[1881] In one aspect, an antibody or antigen-binding fragment thereof is provided, wherein the antibody or antigen-binding fragment thereof comprises a VH as in any of the embodiments provided above, and a VL as in any of the embodiments provided above. In some embodiments, the antibody or antigen-binding fragment thereof comprises the VH amino acid sequence of SEQ ID NO: 131, and the VL amino acid sequence of SEQ ID NO: 402, optionally including post-translational modifications of those sequences.

### TKIP1003

[1882] In one aspect, the present disclosure provides an antibody or antigen-binding fragment thereof comprising at least one or both variable regions selected from: a. VH comprising the amino acid sequence of SEQ ID NO: 132 and b. VL comprising the amino acid sequence of SEQ ID NO: 403.

[1883] In one aspect, the present disclosure provides an antibody or antigen-binding fragment thereof comprising at least one, two, three, four, five, or six CDRs selected from: a. CDR-H1 comprising the amino acid sequence of SEQ ID NO: 674, b. CDR-H2 comprising the amino acid sequence of SEQ ID NO: 1216, c. CDR-H3 comprising the amino acid sequence of SEQ ID NO: 1758, d. CDR-L1 comprising the amino acid sequence of SEQ ID NO: 945, e. CDR-L2 comprising the amino acid sequence of SEQ ID NO: 1487, and f. CDR-L3 comprising the amino acid sequence of SEQ ID NO: 2029.

[1884] In one aspect, the present disclosure provides an antibody or antigen-binding fragment thereof comprising a CDR-H3 comprising the amino acid sequence of SEQ ID NO: 1758, and a CDR-L3 comprising the amino acid sequence of SEQ ID NO: 2029.

[1885] In one aspect, the present disclosure provides an antibody or antigen-binding fragment thereof comprising at least one, at least two, or all three VH CDR sequences selected from: a CDR-H1 comprising the amino acid sequence of SEQ ID NO: 674, b. CDR-H2 comprising the amino acid sequence of SEQ ID NO: 1216, c. CDR-H3 comprising the amino acid sequence of SEQ ID NO: 1758, and a VL comprising the amino acid sequence of SEQ ID NO: 403.

[1886] In one aspect, the present disclosure provides an antibody or antigen-binding fragment thereof comprising at least one, at least two, or all three VL CDR sequences selected from: a. CDR-L1 comprising the amino acid sequence of SEQ ID NO: 945, b. CDR-L2 comprising the amino acid sequence of SEQ ID NO: 1487, c. CDR-L3 comprising the amino acid sequence of SEQ ID NO: 2029, and a VH comprising the amino acid sequence of SEQ ID NO: 132.

[1887] In one aspect, an antibody or antigen-binding fragment thereof is provided, wherein the antibody or antigen-binding fragment thereof comprises a heavy chain variable domain (VH) having at least 90%, 91%, 92%, 93%, 94%, 95%, 96%, 97%, 98%, 99%, or 100% sequence identity to the amino acid sequence SEQ ID NO: 132. In some embodiments, a VH sequence having at least 90%, 91%, 92%, 93%, 94%, 95%, 96%, 97%, 98%, or 99% identity contains substitutions (e.g., conservative substitutions), insertions, or deletions relative to the reference sequence, but an antibody or antigen-binding fragment thereof comprising that sequence retains the ability to bind to same antigen as of the parent (e.g., cancer associated antigen). In some embodiments, a total of 1 to 10 amino acids have been substituted, inserted and/or deleted in the amino acid sequence SEQ ID NO: 132. In some embodiments, substitutions, insertions, or deletions occur in regions outside the CDRs (e.g., in the FRs). Optionally, the antibody or antigen-binding fragment thereof comprises the VH sequence SEQ ID NO: 132, including one or more post-translational modifications of that sequence. In a particular embodiment, the VH comprises one, two or three CDRs selected from: a. CDR-H1, comprising the amino acid sequence SEQ ID NO: 674, b. CDR-H2, comprising the amino acid sequence SEQ ID NO: 1216, and c. CDR-H3, comprising the amino acid sequence SEQ ID NO: 1758.

[1888] In one aspect, an antibody or antigen-binding fragment thereof is provided, wherein the antibody or antigen-binding fragment thereof comprises a light chain variable domain (VL) having at least 90%, 91%, 92%, 93%, 94%, 95%, 96%, 97%, 98%, 99%, or 100% sequence identity to the amino acid sequence SEQ ID NO: 403. In some embodiments, a VL sequence having at least 90%, 91%, 92%, 93%, 94%, 95%, 96%, 97%, 98%, or 99% identity contains substitutions (e.g., conservative substitutions), insertions, or deletions relative to the reference sequence, but an antibody or antigen-binding fragment thereof comprising that sequence retains the ability to bind to same antigen as the parent (e.g., cancer associated antigen). In some embodiments, a total of 1 to 10 amino acids have been substituted, inserted and/or deleted in the amino acid sequence SEQ ID NO: 403. In some embodiments, the substitutions, insertions, or deletions occur in regions outside the CDRs (e.g., in the FRs). Optionally, the antibody or antigen-binding fragment thereof comprises the VL sequence SEQ ID NO: 403, including one or more post-translational modifications of that sequence. In a particular embodiment, the VL comprises one, two or three CDRs selected from: a. CDR-L1, comprising the amino acid sequence SEQ ID NO: 945, b. CDR-L2, comprising the amino acid sequence SEQ ID NO: 1487, and c. CDR-L3, comprising the amino acid sequence SEQ ID NO: 2029.

[1889] In one aspect, an antibody or antigen-binding fragment thereof is provided, wherein the antibody or antigen-binding fragment thereof comprises a VH as in any of the embodiments provided above, and a VL as in any of the embodiments provided above. In some embodiments, the antibody or antigen-binding fragment thereof comprises the VH amino acid sequence of SEQ ID NO: 132, and the VL amino acid sequence of SEQ ID NO: 403, optionally including post-translational modifications of those sequences.

### TKIP1004

[1890] In one aspect, the present disclosure provides an antibody or antigen-binding fragment thereof comprising at least one or both variable regions selected from: a. VH comprising the amino acid sequence of SEQ ID NO: 133 and b. VL comprising the amino acid sequence of SEQ ID NO: 404.

[1891] In one aspect, the present disclosure provides an antibody or antigen-binding fragment thereof comprising at least one, two, three, four, five, or six CDRs selected from: a. CDR-H1 comprising the amino acid sequence of SEQ ID NO: 675, b. CDR-H2 comprising the amino acid sequence of SEQ ID NO: 1217, c. CDR-H3 comprising the amino acid sequence of SEQ ID NO: 1759, d. CDR-L1 comprising the amino acid sequence of SEQ ID NO: 946, e. CDR-L2 comprising the amino acid sequence of SEQ ID NO: 1488, and f. CDR-L3 comprising the amino acid sequence of SEQ ID NO: 2030.

[1892] In one aspect, the present disclosure provides an antibody or antigen-binding fragment thereof comprising a CDR-H3 comprising the amino acid sequence of SEQ ID NO: 1759, and a CDR-L3 comprising the amino acid sequence of SEQ ID NO: 2030.

[1893] In one aspect, the present disclosure provides an antibody or antigen-binding fragment thereof comprising at least one, at least two, or all three VH CDR sequences selected from: a. CDR-H1 comprising the amino acid sequence of SEQ ID NO: 675, b. CDR-H2 comprising the amino acid sequence of SEQ ID NO: 1217, c. CDR-H3 comprising the amino acid sequence of SEQ ID NO: 1759, and a VL comprising the amino acid sequence of SEQ ID NO: 404.

[1894] In one aspect, the present disclosure provides an antibody or antigen-binding fragment thereof comprising at least one, at least two, or all three VL CDR sequences selected from: a. CDR-L1 comprising the amino acid sequence of SEQ ID NO: 946, b. CDR-L2 comprising the amino acid sequence of SEQ ID NO: 1488, c. CDR-L3 comprising the amino acid sequence of SEQ ID NO: 2030, and a VH comprising the amino acid sequence of SEQ ID NO: 133.

[1895] In one aspect, an antibody or antigen-binding fragment thereof is provided, wherein the antibody or antigen-binding fragment thereof comprises a heavy chain variable domain (VH) having at least 90%, 91%, 92%, 93%, 94%, 95%, 96%, 97%, 98%, 99%, or 100% sequence identity to the amino acid sequence SEQ ID NO: 133. In some embodiments, a VH sequence having at least 90%, 91%, 92%, 93%, 94%, 95%, 96%, 97%, 98%, or 99% identity contains substitutions (e.g., conservative substitutions), insertions, or deletions relative to the reference sequence, but an antibody or antigen-binding fragment thereof comprising that sequence retains the ability to bind to same antigen as of the parent (e.g., cancer associated antigen). In some embodiments, a total of 1 to 10 amino acids have been substituted, inserted and/or deleted in the amino acid sequence SEQ ID NO: 133. In some embodiments, substitutions, insertions, or deletions occur in regions outside the CDRs (e.g., in the FRs). Optionally, the antibody or antigen-binding fragment thereof comprises the VH sequence SEQ ID NO: 133, including one or more post-translational modifications of that sequence. In a particular embodiment, the VH comprises one, two or three CDRs selected from: a CDR-H1, comprising the amino acid sequence SEQ ID NO: 675, b. CDR-H2, comprising the amino acid sequence SEQ ID NO: 1217, and c. CDR-H3, comprising the amino acid sequence SEQ ID NO: 1759.

[1896] In one aspect, an antibody or antigen-binding fragment thereof is provided, wherein the antibody or antigen-binding fragment thereof comprises a light chain variable domain (VL) having at least 90%, 91%, 92%, 93%, 94%, 95%, 96%, 97%, 98%, 99%, or 100% sequence identity to the amino acid sequence SEQ ID NO: 404. In some embodiments, a VL sequence having at least 90%, 91%, 92%, 93%, 94%, 95%, 96%, 97%, 98%, or 99% identity contains substitutions (e.g., conservative substitutions), insertions, or deletions relative to the reference sequence, but an antibody or antigen-binding fragment thereof comprising that sequence retains the ability to bind to same antigen as the parent (e.g., cancer associated antigen). In some embodiments, a total of 1 to 10 amino acids have been substituted, inserted and/or deleted in the amino acid sequence SEQ ID NO: 404. In some embodiments, the substitutions, insertions, or deletions occur in regions outside the CDRs (e.g., in the FRs). Optionally, the antibody or antigen-binding fragment thereof comprises the VL sequence SEQ ID NO: 404, including one or more post-translational modifications of that sequence. In a particular embodiment, the VL comprises one, two or three CDRs selected from: a. CDR-L1, comprising the amino acid sequence SEQ ID NO: 946, b. CDR-L2, comprising the amino acid sequence SEQ ID NO: 1488, and c. CDR-L3, comprising the amino acid sequence SEQ ID NO: 2030.

[1897] In one aspect, an antibody or antigen-binding fragment thereof is provided, wherein the antibody or antigen-binding fragment thereof comprises a VH as in any of the embodiments provided above, and a VL as in any of the embodiments provided above. In some embodiments, the antibody or antigen-binding fragment thereof comprises the VH amino acid sequence of SEQ ID NO: 133, and the VL amino acid sequence of SEQ ID NO: 404, optionally including post-translational modifications of those sequences.

### TKIP1005

[1898] In one aspect, the present disclosure provides an antibody or antigen-binding fragment thereof comprising at least one or both variable regions selected from: a. VH comprising the amino acid sequence of SEQ ID NO: 134 and b. VL comprising the amino acid sequence of SEQ ID NO: 405.

[1899] In one aspect, the present disclosure provides an antibody or antigen-binding fragment thereof comprising at least one, two, three, four, five, or six CDRs selected from: a. CDR-H1 comprising the amino acid sequence of SEQ ID NO: 676, b. CDR-H2 comprising the amino acid sequence of SEQ ID NO: 1218, c. CDR-H3 comprising the amino acid sequence of SEQ ID NO: 1760, d. CDR-L1 comprising the amino acid sequence of SEQ ID NO: 947, e. CDR-L2 comprising the amino acid sequence of SEQ ID NO: 1489, and f. CDR-L3 comprising the amino acid sequence of SEQ ID NO: 2031.

[1900] In one aspect, the present disclosure provides an antibody or antigen-binding fragment thereof comprising a CDR-H3 comprising the amino acid sequence of SEQ ID NO: 1760, and a CDR-L3 comprising the amino acid sequence of SEQ ID NO: 2031.

[1901] In one aspect, the present disclosure provides an antibody or antigen-binding fragment thereof comprising at least one, at least two, or all three VH CDR sequences selected from: a. CDR-H1 comprising the amino acid sequence of SEQ ID NO: 676, b. CDR-H2 comprising the amino acid sequence of SEQ ID NO: 1218, c. CDR-H3 comprising the amino acid sequence of SEQ ID NO: 1760, and a VL comprising the amino acid sequence of SEQ ID NO: 405.

[1902] In one aspect, the present disclosure provides an antibody or antigen-binding fragment thereof comprising at least one, at least two, or all three VL CDR sequences selected from: a. CDR-L1 comprising the amino acid sequence of SEQ ID NO: 947, b. CDR-L2 comprising the amino acid sequence of SEQ ID NO: 1489, c. CDR-L3 comprising the amino acid sequence of SEQ ID NO: 2031, and a VH comprising the amino acid sequence of SEQ ID NO: 134.

[1903] In one aspect, an antibody or antigen-binding fragment thereof is provided, wherein the antibody or antigen-binding fragment thereof comprises a heavy chain variable domain (VH) having at least 90%, 91%, 92%, 93%, 94%, 95%, 96%, 97%, 98%, 99%, or 100% sequence identity to the amino acid sequence SEQ ID NO: 134. In some embodiments, a VH sequence having at least 90%, 91%, 92%, 93%, 94%, 95%, 96%, 97%, 98%, or 99% identity contains substitutions (e.g., conservative substitutions), insertions, or deletions relative to the reference sequence, but an antibody or antigen-binding fragment thereof comprising that sequence retains the ability to bind to same antigen as of the parent (e.g., cancer associated antigen). In some embodiments, a total of 1 to 10 amino acids have been substituted, inserted and/or deleted in the amino acid sequence SEQ ID NO: 134. In some embodiments, substitutions, insertions, or deletions occur in regions outside the CDRs (e.g., in the FRs). Optionally, the antibody or antigen-binding fragment thereof comprises the VH sequence SEQ ID NO: 134, including one or more post-translational modifications of that sequence. In a particular embodiment, the VH comprises one, two or three CDRs selected from: a. CDR-H1, comprising the amino acid sequence SEQ ID NO: 676, b. CDR-H2, comprising the amino acid sequence SEQ ID NO: 1218, and c. CDR-H3, comprising the amino acid sequence SEQ ID NO: 1760.

[1904] In one aspect, an antibody or antigen-binding fragment thereof is provided, wherein the antibody or antigen-binding fragment thereof comprises a light chain variable domain (VL) having at least 90%, 91%, 92%, 93%, 94%, 95%, 96%, 97%, 98%, 99%, or 100% sequence identity to the amino acid sequence SEQ ID NO: 405. In some embodiments, a VL sequence having at least 90%, 91%, 92%, 93%, 94%, 95%, 96%, 97%, 98%, or 99% identity contains substitutions (e.g., conservative substitutions), insertions, or deletions relative to the reference sequence, but an antibody or antigen-binding fragment thereof comprising that sequence retains the ability to bind to same antigen as the parent (e.g., cancer associated antigen). In some embodiments, a total of 1 to 10 amino acids have been substituted, inserted and/or deleted in the amino acid sequence SEQ ID NO: 405. In some embodiments, the substitutions, insertions, or deletions occur in regions outside the CDRs (e.g., in the FRs). Optionally, the antibody or antigen-binding fragment thereof comprises the VL sequence SEQ ID NO: 405, including one or more post-translational modifications of that sequence. In a particular embodiment, the VL comprises one, two or three CDRs selected from: a. CDR-L1, comprising the amino acid sequence SEQ ID NO: 947, b. CDR-L2, comprising the amino acid sequence SEQ ID NO: 1489, and c. CDR-L3, comprising the amino acid sequence SEQ ID NO: 2031.

[1905] In one aspect, an antibody or antigen-binding fragment thereof is provided, wherein the antibody or antigen-binding fragment thereof comprises a VH as in any of the embodiments provided above, and a VL as in any of the embodiments provided above. In some embodiments, the antibody or antigen-binding fragment thereof comprises the VH amino acid sequence of SEQ ID NO: 134, and the VL amino acid sequence of SEQ ID NO: 405, optionally including post-translational modifications of those sequences.

### TKIP1006

[1906] In one aspect, the present disclosure provides an antibody or antigen-binding fragment thereof comprising at least one or both variable regions selected from: a. VH comprising the amino acid sequence of SEQ ID NO: 135 and b. VL comprising the amino acid sequence of SEQ ID NO: 406.

[1907] In one aspect, the present disclosure provides an antibody or antigen-binding fragment thereof comprising at least one, two, three, four, five, or six CDRs selected from: a. CDR-H1 comprising the amino acid sequence of SEQ ID NO: 677, b. CDR-H2 comprising the amino acid sequence of SEQ ID NO: 1219, c. CDR-H3 comprising the amino acid sequence of SEQ ID NO: 1761, d. CDR-L1 comprising the amino acid sequence of SEQ ID NO: 948, e. CDR-L2 comprising the amino acid sequence of SEQ ID NO: 1490, and f. CDR-L3 comprising the amino acid sequence of SEQ ID NO: 2032.

[1908] In one aspect, the present disclosure provides an antibody or antigen-binding fragment thereof comprising a CDR-H3 comprising the amino acid sequence of SEQ ID NO: 1761, and a CDR-L3 comprising the amino acid sequence of SEQ ID NO: 2032.

[1909] In one aspect, the present disclosure provides an antibody or antigen-binding fragment thereof comprising at least one, at least two, or all three VH CDR sequences selected from: a. CDR-H1 comprising the amino acid sequence of SEQ ID NO: 677, b. CDR-H2 comprising the amino acid sequence of SEQ ID NO: 1219, c. CDR-H3 comprising the amino acid sequence of SEQ ID NO: 1761, and a VL comprising the amino acid sequence of SEQ ID NO: 406.

[1910] In one aspect, the present disclosure provides an antibody or antigen-binding fragment thereof comprising at least one, at least two, or all three VL CDR sequences selected from: a. CDR-L1 comprising the amino acid sequence of SEQ ID NO: 948, b. CDR-L2 comprising the amino acid sequence of SEQ ID NO: 1490, c. CDR-L3 comprising the amino acid sequence of SEQ ID NO: 2032, and a VH comprising the amino acid sequence of SEQ ID NO: 135.

[1911] In one aspect, an antibody or antigen-binding fragment thereof is provided, wherein the antibody or antigen-binding fragment thereof comprises a heavy chain variable domain (VH) having at least 90%, 91%, 92%, 93%, 94%, 95%, 96%, 97%, 98%, 99%, or 100% sequence identity to the amino acid sequence SEQ ID NO: 135. In some embodiments, a VH sequence having at least 90%, 91%, 92%, 93%, 94%, 95%, 96%, 97%, 98%, or 99% identity contains substitutions (e.g., conservative substitutions), insertions, or deletions relative to the reference sequence, but an antibody or antigen-binding fragment thereof comprising that sequence retains the ability to bind to same antigen as of the parent (e.g., cancer associated antigen). In some embodiments, a total of 1 to 10 amino acids have been substituted, inserted and/or deleted in the amino acid sequence SEQ ID NO: 135. In some embodiments, substitutions, insertions, or deletions occur in regions outside the CDRs (e.g., in the FRs). Optionally, the antibody or antigen-binding fragment thereof comprises the VH sequence SEQ ID NO: 135, including one or more post-translational modifications of that sequence. In a particular embodiment, the VH comprises one, two or three CDRs selected from: a. CDR-H1, comprising the amino acid sequence SEQ ID NO: 677, b. CDR-H2, comprising the amino acid sequence SEQ ID NO: 1219, and c. CDR-H3, comprising the amino acid sequence SEQ ID NO: 1761.

[1912] In one aspect, an antibody or antigen-binding fragment thereof is provided, wherein the antibody or antigen-binding fragment thereof comprises a light chain variable domain (VL) having at least 90%, 91%, 92%, 93%, 94%, 95%, 96%, 97%, 98%, 99%, or 100% sequence identity to the amino acid sequence SEQ ID NO: 406. In some embodiments, a VL sequence having at least 90%, 91%, 92%, 93%, 94%, 95%, 96%, 97%, 98%, or 99% identity contains substitutions (e.g., conservative substitutions), insertions, or deletions relative to the reference sequence, but an antibody or antigen-binding fragment thereof comprising that sequence retains the ability to bind to same antigen as the parent (e.g., cancer associated antigen). In some embodiments, a total of 1 to 10 amino acids have been substituted, inserted and/or deleted in the amino acid sequence SEQ ID NO: 406. In some embodiments, the substitutions, insertions, or deletions occur in regions outside the CDRs (e.g., in the FRs). Optionally, the antibody or antigen-binding fragment thereof comprises the VL sequence SEQ ID NO: 406, including one or more post-translational modifications of that sequence. In a particular embodiment, the VL comprises one, two or three CDRs selected from: a. CDR-L1, comprising the amino acid sequence SEQ ID NO: 948, b. CDR-L2, comprising the amino acid sequence SEQ ID NO: 1490, and c. CDR-L3, comprising the amino acid sequence SEQ ID NO: 2032.

[1913] In one aspect, an antibody or antigen-binding fragment thereof is provided, wherein the antibody or antigen-binding fragment thereof comprises a VH as in any of the embodiments provided above, and a VL as in any of the embodiments provided above. In some embodiments, the antibody or antigen-binding fragment thereof comprises the VH amino acid sequence of SEQ ID NO: 135, and the VL amino acid sequence of SEQ ID NO: 406, optionally including post-translational modifications of those sequences.

### TLGG1001

[1914] In one aspect, the present disclosure provides an antibody or antigen-binding fragment thereof comprising at least one or both variable regions selected from: a. VH comprising the amino acid sequence of SEQ ID NO: 136 and b. VL comprising the amino acid sequence of SEQ ID NO: 407.

[1915] In one aspect, the present disclosure provides an antibody or antigen-binding fragment thereof comprising at least one, two, three, four, five, or six CDRs selected from: a. CDR-H1 comprising the amino acid sequence of SEQ ID NO: 678, b. CDR-H2 comprising the amino acid sequence of SEQ ID NO: 1220, c. CDR-H3 comprising the amino acid sequence of SEQ ID NO: 1762, d. CDR-L1 comprising the amino acid sequence of SEQ ID NO: 949, e. CDR-L2 comprising the amino acid sequence of SEQ ID NO: 1491, and f. CDR-L3 comprising the amino acid sequence of SEQ ID NO: 2033.

[1916] In one aspect, the present disclosure provides an antibody or antigen-binding fragment thereof comprising a CDR-H3 comprising the amino acid sequence of SEQ ID NO: 1762, and a CDR-L3 comprising the amino acid sequence of SEQ ID NO: 2033.

[1917] In one aspect, the present disclosure provides an antibody or antigen-binding fragment thereof comprising at least one, at least two, or all three VH CDR sequences selected from: a. CDR-H1 comprising the amino acid sequence of SEQ ID NO: 678, b. CDR-H2 comprising the amino acid sequence of SEQ ID NO: 1220, c. CDR-H3 comprising the amino acid sequence of SEQ ID NO: 1762, and a VL comprising the amino acid sequence of SEQ ID NO: 407.

[1918] In one aspect, the present disclosure provides an antibody or antigen-binding fragment thereof comprising at least one, at least two, or all three VL CDR sequences selected from: a. CDR-L1 comprising the amino acid sequence of SEQ ID NO: 949, b. CDR-L2 comprising the amino acid sequence of SEQ ID NO: 1491, c. CDR-L3 comprising the amino acid sequence of SEQ ID NO: 2033, and a VH comprising the amino acid sequence of SEQ ID NO: 136.

[1919] In one aspect, an antibody or antigen-binding fragment thereof is provided, wherein the antibody or antigen-binding fragment thereof comprises a heavy chain variable domain (VH) having at least 90%, 91%, 92%, 93%, 94%, 95%, 96%, 97%, 98%, 99%, or 100% sequence identity to the amino acid sequence SEQ ID NO: 136. In some embodiments, a VH sequence having at least 90%, 91%, 92%, 93%, 94%, 95%, 96%, 97%, 98%, or 99% identity contains substitutions (e.g., conservative substitutions), insertions, or deletions relative to the reference sequence, but an antibody or antigen-binding fragment thereof comprising that sequence retains the ability to bind to same antigen as of the parent (e.g., cancer associated antigen). In some embodiments, a total of 1 to 10 amino acids have been substituted, inserted and/or deleted in the amino acid sequence SEQ ID NO: 136. In some embodiments, substitutions, insertions, or deletions occur in regions outside the CDRs (e.g., in the FRs). Optionally, the antibody or antigen-binding fragment thereof comprises the VH sequence SEQ ID NO: 136, including one or more post-translational modifications of that sequence. In a particular embodiment, the VH comprises one, two or three CDRs selected from: a. CDR-H1, comprising the amino acid sequence SEQ ID NO: 678, b. CDR-H2, comprising the amino acid sequence SEQ ID NO: 1220, and c. CDR-H3, comprising the amino acid sequence SEQ ID NO: 1762.

[1920] In one aspect, an antibody or antigen-binding fragment thereof is provided, wherein the antibody or antigen-binding fragment thereof comprises a light chain variable domain (VL) having at least 90%, 91%, 92%, 93%, 94%, 95%, 96%, 97%, 98%, 99%, or 100% sequence identity to the amino acid sequence SEQ ID NO: 407. In some embodiments, a VL sequence having at least 90%, 91%, 92%, 93%, 94%, 95%, 96%, 97%, 98%, or 99% identity contains substitutions (e.g., conservative substitutions), insertions, or deletions relative to the reference sequence, but an antibody or antigen-binding fragment thereof comprising that sequence retains the ability to bind to same antigen as the parent (e.g., cancer associated antigen). In some embodiments, a total of 1 to 10 amino acids have been substituted, inserted and/or deleted in the amino acid sequence SEQ ID NO: 407. In some embodiments, the substitutions, insertions, or deletions occur in regions outside the CDRs (e.g., in the FRs). Optionally, the antibody or antigen-binding fragment thereof comprises the VL sequence SEQ ID NO: 407, including one or more post-translational modifications of that sequence. In a particular embodiment, the VL comprises one, two or three CDRs selected from: a. CDR-L1, comprising the amino acid sequence SEQ ID NO: 949, b. CDR-L2, comprising the amino acid sequence SEQ ID NO: 1491, and c. CDR-L3, comprising the amino acid sequence SEQ ID NO: 2033.

[1921] In one aspect, an antibody or antigen-binding fragment thereof is provided, wherein the antibody or antigen-binding fragment thereof comprises a VH as in any of the embodiments provided above, and a VL as in any of the embodiments provided above. In some embodiments, the antibody or antigen-binding fragment thereof comprises the VH amino acid sequence of SEQ ID NO: 136, and the VL amino acid sequence of SEQ ID NO: 407, optionally including post-translational modifications of those sequences.

### TLIV1001

[1922] In one aspect, the present disclosure provides an antibody or antigen-binding fragment thereof comprising at least one or both variable regions selected from: a. VH comprising the amino acid sequence of SEQ ID NO: 137 and b. VL comprising the amino acid sequence of SEQ ID NO: 408.

[1923] In one aspect, the present disclosure provides an antibody or antigen-binding fragment thereof comprising at least one, two, three, four, five, or six CDRs selected from: a. CDR-H1 comprising the amino acid sequence of SEQ ID NO: 679, b. CDR-H2 comprising the amino acid sequence of SEQ ID NO: 1221, c. CDR-H3 comprising the amino acid sequence of SEQ ID NO: 1763, d. CDR-L1 comprising the amino acid sequence of SEQ ID NO: 950, e. CDR-L2 comprising the amino acid sequence of SEQ ID NO: 1492, f. CDR-L3 comprising the amino acid sequence of SEQ ID NO: 2034.

[1924] In one aspect, the present disclosure provides an antibody or antigen-binding fragment thereof comprising a CDR-H3 comprising the amino acid sequence of SEQ ID NO: 1763, and a CDR-L3 comprising the amino acid sequence of SEQ ID NO: 2034.

[1925] In one aspect, the present disclosure provides an antibody or antigen-binding fragment thereof comprising at least one, at least two, or all three VH CDR sequences selected from: a. CDR-H1 comprising the amino acid sequence of SEQ ID NO: 679, b. CDR-H2 comprising the amino acid sequence of SEQ ID NO: 1221, c. CDR-H3 comprising the amino acid sequence of SEQ ID NO: 1763, and a VL comprising the amino acid sequence of SEQ ID NO: 408.

[1926] In one aspect, the present disclosure provides an antibody or antigen-binding fragment thereof comprising at least one, at least two, or all three VL CDR sequences selected from: a. CDR-L1 comprising the amino acid sequence of SEQ ID NO: 950, b. CDR-L2 comprising the amino acid sequence of SEQ ID NO: 1492, c. CDR-L3 comprising the amino acid sequence of SEQ ID NO: 2034, and a VH comprising the amino acid sequence of SEQ ID NO: 137.

[1927] In one aspect, an antibody or antigen-binding fragment thereof is provided, wherein the antibody or antigen-binding fragment thereof comprises a heavy chain variable domain (VH) having at least 90%, 91%, 92%, 93%, 94%, 95%, 96%, 97%, 98%, 99%, or 100% sequence identity to the amino acid sequence SEQ ID NO: 137. In some embodiments, a VH sequence having at least 90%, 91%, 92%, 93%, 94%, 95%, 96%, 97%, 98%, or 99% identity contains substitutions (e.g., conservative substitutions), insertions, or deletions relative to the reference sequence, but an antibody or antigen-binding fragment thereof comprising that sequence retains the ability to bind to same antigen as of the parent (e.g., cancer associated antigen). In some embodiments, a total of 1 to 10 amino acids have been substituted, inserted and/or deleted in the amino acid sequence SEQ ID NO: 137. In some embodiments, substitutions, insertions, or deletions occur in regions outside the CDRs (e.g., in the FRs). Optionally, the antibody or antigen-binding fragment thereof comprises the VH sequence SEQ ID NO: 137, including one or more post-translational modifications of that sequence. In a particular embodiment, the VH comprises one, two or three CDRs selected from: a. CDR-H1, comprising the amino acid sequence SEQ ID NO: 679, b. CDR-H2, comprising the amino acid sequence SEQ ID NO: 1221, and c. CDR-H3, comprising the amino acid sequence SEQ ID NO: 1763.

[1928] In one aspect, an antibody or antigen-binding fragment thereof is provided, wherein the antibody or antigen-binding fragment thereof comprises a light chain variable domain (VL) having at least 90%, 91%, 92%, 93%, 94%, 95%, 96%, 97%, 98%, 99%, or 100% sequence identity to the amino acid sequence SEQ ID NO: 408. In some embodiments, a VL sequence having at least 90%, 91%, 92%, 93%, 94%, 95%, 96%, 97%, 98%, or 99% identity contains substitutions (e.g., conservative substitutions), insertions, or deletions relative to the reference sequence, but an antibody or antigen-binding fragment thereof comprising that sequence retains the ability to bind to same antigen as the parent (e.g., cancer associated antigen). In some embodiments, a total of 1 to 10 amino acids have been substituted, inserted and/or deleted in the amino acid sequence SEQ ID NO: 408. In some embodiments, the substitutions, insertions, or deletions occur in regions outside the CDRs (e.g., in the FRs). Optionally, the antibody or antigen-binding fragment thereof comprises the VL sequence SEQ ID NO: 408, including one or more post-translational modifications of that sequence. In a particular embodiment, the VL comprises one, two or three CDRs selected from: a. CDR-L1, comprising the amino acid sequence SEQ ID NO: 950, b. CDR-L2, comprising the amino acid sequence SEQ ID NO: 1492, and c. CDR-L3, comprising the amino acid sequence SEQ ID NO: 2034.

[1929] In one aspect, an antibody or antigen-binding fragment thereof is provided, wherein the antibody or antigen-binding fragment thereof comprises a VH as in any of the embodiments provided above, and a VL as in any of the embodiments provided above. In some embodiments, the antibody or antigen-binding fragment thereof comprises the VH amino acid sequence of SEQ ID NO: 137, and the VL amino acid sequence of SEQ ID NO: 408, optionally including post-translational modifications of those sequences.

### TLIV1002

[1930] In one aspect, the present disclosure provides an antibody or antigen-binding fragment thereof comprising at least one or both variable regions selected from: a. VH comprising the amino acid sequence of SEQ ID NO: 138 and b. VL comprising the amino acid sequence of SEQ ID NO: 409.

[1931] In one aspect, the present disclosure provides an antibody or antigen-binding fragment thereof comprising at least one, two, three, four, five, or six CDRs selected from: a. CDR-H1 comprising the amino acid sequence of SEQ ID NO: 680, b. CDR-H2 comprising the amino acid sequence of SEQ ID NO: 1222, c. CDR-H3 comprising the amino acid sequence of SEQ ID NO: 1764, d. CDR-L1 comprising the amino acid sequence of SEQ ID NO: 951, e. CDR-L2 comprising the amino acid sequence of SEQ ID NO: 1493, and f. CDR-L3 comprising the amino acid sequence of SEQ ID NO: 2035.

[1932] In one aspect, the present disclosure provides an antibody or antigen-binding fragment thereof comprising a CDR-H3 comprising the amino acid sequence of SEQ ID NO: 1764, and a CDR-L3 comprising the amino acid sequence of SEQ ID NO: 2035.

[1933] In one aspect, the present disclosure provides an antibody or antigen-binding fragment thereof comprising at least one, at least two, or all three VH CDR sequences selected from: a. CDR-H1 comprising the amino acid sequence of SEQ ID NO: 680, b. CDR-H2 comprising the amino acid sequence of SEQ ID NO: 1222, c. CDR-H3 comprising the amino acid sequence of SEQ ID NO: 1764, and a VL comprising the amino acid sequence of SEQ ID NO: 409.

[1934] In one aspect, the present disclosure provides an antibody or antigen-binding fragment thereof comprising at least one, at least two, or all three VL CDR sequences selected from: a. CDR-L1 comprising the amino acid sequence of SEQ ID NO: 951, b. CDR-L2 comprising the amino acid sequence of SEQ ID NO: 1493, c. CDR-L3 comprising the amino acid sequence of SEQ ID NO: 2035, and a VH comprising the amino acid sequence of SEQ ID NO: 138.

[1935] In one aspect, an antibody or antigen-binding fragment thereof is provided, wherein the antibody or antigen-binding fragment thereof comprises a heavy chain variable domain (VH) having at least 90%, 91%, 92%, 93%, 94%, 95%, 96%, 97%, 98%, 99%, or 100% sequence identity to the amino acid sequence SEQ ID NO: 138. In some embodiments, a VH sequence having at least 90%, 91%, 92%, 93%, 94%, 95%, 96%, 97%, 98%, or 99% identity contains substitutions (e.g., conservative substitutions), insertions, or deletions relative to the reference sequence, but an antibody or antigen-binding fragment thereof comprising that sequence retains the ability to bind to same antigen as of the parent (e.g., cancer associated antigen). In some embodiments, a total of 1 to 10 amino acids have been substituted, inserted and/or deleted in the amino acid sequence SEQ ID NO: 138. In some embodiments, substitutions, insertions, or deletions occur in regions outside the CDRs (e.g., in the FRs). Optionally, the antibody or antigen-binding fragment thereof comprises the VH sequence SEQ ID NO: 138, including one or more post-translational modifications of that sequence. In a particular embodiment, the VH comprises one, two or three CDRs selected from: a. CDR-H1, comprising the amino acid sequence SEQ ID NO: 680, b. CDR-H2, comprising the amino acid sequence SEQ ID NO: 1222, and c. CDR-H3, comprising the amino acid sequence SEQ ID NO: 1764.

[1936] In one aspect, an antibody or antigen-binding fragment thereof is provided, wherein the antibody or antigen-binding fragment thereof comprises a light chain variable domain (VL) having at least 90%, 91%, 92%, 93%, 94%, 95%, 96%, 97%, 98%, 99%, or 100% sequence identity to the amino acid sequence SEQ ID NO: 409. In some embodiments, a VL sequence having at least 90%, 91%, 92%, 93%, 94%, 95%, 96%, 97%, 98%, or 99% identity contains substitutions (e.g., conservative substitutions), insertions, or deletions relative to the reference sequence, but an antibody or antigen-binding fragment thereof comprising that sequence retains the ability to bind to same antigen as the parent (e.g., cancer associated antigen). In some embodiments, a total of 1 to 10 amino acids have been substituted, inserted and/or deleted in the amino acid sequence SEQ ID NO: 409. In some embodiments, the substitutions, insertions, or deletions occur in regions outside the CDRs (e.g., in the FRs). Optionally, the antibody or antigen-binding fragment thereof comprises the VL sequence SEQ ID NO: 409, including one or more post-translational modifications of that sequence. In a particular embodiment, the VL comprises one, two or three CDRs selected from: a. CDR-L1, comprising the amino acid sequence SEQ ID NO: 951, b. CDR-L2, comprising the amino acid sequence SEQ ID NO: 1493, and c. CDR-L3, comprising the amino acid sequence SEQ ID NO: 2035.

[1937] In one aspect, an antibody or antigen-binding fragment thereof is provided, wherein the antibody or antigen-binding fragment thereof comprises a VH as in any of the embodiments provided above, and a VL as in any of the embodiments provided above. In some embodiments, the antibody or antigen-binding fragment thereof comprises the VH amino acid sequence of SEQ ID NO: 138, and the VL amino acid sequence of SEQ ID NO: 409, optionally including post-translational modifications of those sequences.

### TLIV1003

[1938] In one aspect, the present disclosure provides an antibody or antigen-binding fragment thereof comprising at least one or both variable regions selected from: a. VH comprising the amino acid sequence of SEQ ID NO: 139 and b. VL comprising the amino acid sequence of SEQ ID NO: 410.

[1939] In one aspect, the present disclosure provides an antibody or antigen-binding fragment thereof comprising at least one, two, three, four, five, or six CDRs selected from: a. CDR-H1 comprising the amino acid sequence of SEQ ID NO: 681, b. CDR-H2 comprising the amino acid sequence of SEQ ID NO: 1223, c. CDR-H3 comprising the amino acid sequence of SEQ ID NO: 1765, d. CDR-L1 comprising the amino acid sequence of SEQ ID NO: 952, e. CDR-L2 comprising the amino acid sequence of SEQ ID NO: 1494, and f. CDR-L3 comprising the amino acid sequence of SEQ ID NO: 2036.

[1940] In one aspect, the present disclosure provides an antibody or antigen-binding fragment thereof comprising a CDR-H3 and a CDR-L3 comprising the amino acid sequence of SEQ ID NO: 2036.

[1941] In one aspect, the present disclosure provides an antibody or antigen-binding fragment thereof comprising at least one, at least two, or all three VH CDR sequences selected from: a. CDR-H1 comprising the amino acid sequence of SEQ ID NO: 681, b. CDR-H2 comprising the amino acid sequence of SEQ ID NO: 1223, c. CDR-H3 comprising the amino acid sequence of SEQ ID NO: 1765, and a VL comprising the amino acid sequence of SEQ ID NO: 410.

[1942] In one aspect, the present disclosure provides an antibody or antigen-binding fragment thereof comprising at least one, at least two, or all three VL CDR sequences selected from: a. CDR-L1 comprising the amino acid sequence of SEQ ID NO: 952, b. CDR-L2 comprising the amino acid sequence of SEQ ID NO: 1494, c. CDR-L3 comprising the amino acid sequence of SEQ ID NO: 2036, and a VH comprising the amino acid sequence of SEQ ID NO: 139.

[1943] In one aspect, an antibody or antigen-binding fragment thereof is provided, wherein the antibody or antigen-binding fragment thereof comprises a heavy chain variable domain (VH) having at least 90%, 91%, 92%, 93%, 94%, 95%, 96%, 97%, 98%, 99%, or 100% sequence identity to the amino acid sequence SEQ ID NO: 139. In some embodiments, a VH sequence having at least 90%, 91%, 92%, 93%, 94%, 95%, 96%, 97%, 98%, or 99% identity contains substitutions (e.g., conservative substitutions), insertions, or deletions relative to the reference sequence, but an antibody or antigen-binding fragment thereof comprising that sequence retains the ability to bind to same antigen as of the parent (e.g., cancer associated antigen). In some embodiments, a total of 1 to 10 amino acids have been substituted, inserted and/or deleted in the amino acid sequence SEQ ID NO: 139. In some embodiments, substitutions, insertions, or deletions occur in regions outside the CDRs (e.g., in the FRs). Optionally, the antibody or antigen-binding fragment thereof comprises the VH sequence SEQ ID NO: 139, including one or more post-translational modifications of that sequence. In a particular embodiment, the VH comprises one, two or three CDRs selected from: a. CDR-H1, comprising the amino acid sequence SEQ ID NO: 681, b. CDR-H2, comprising the amino acid sequence SEQ ID NO: 1223, and c. CDR-H3, comprising the amino acid sequence SEQ ID NO: 1765.

[1944] In one aspect, an antibody or antigen-binding fragment thereof is provided, wherein the antibody or antigen-binding fragment thereof comprises a light chain variable domain (VL) having at least 90%, 91%, 92%, 93%, 94%, 95%, 96%, 97%, 98%, 99%, or 100% sequence identity to the amino acid sequence SEQ ID NO: 410. In some embodiments, a VL sequence having at least 90%, 91%, 92%, 93%, 94%, 95%, 96%, 97%, 98%, or 99% identity contains substitutions (e.g., conservative substitutions), insertions, or deletions relative to the reference sequence, but an antibody or antigen-binding fragment thereof comprising that sequence retains the ability to bind to same antigen as the parent (e.g., cancer associated antigen). In some embodiments, a total of 1 to 10 amino acids have been substituted, inserted and/or deleted in the amino acid sequence SEQ ID NO: 410. In some embodiments, the substitutions, insertions, or deletions occur in regions outside the CDRs (e.g., in the FRs). Optionally, the antibody or antigen-binding fragment thereof comprises the VL sequence SEQ ID NO: 410, including one or more post-translational modifications of that sequence. In a particular embodiment, the VL comprises one, two or three CDRs selected from: a. CDR-L1, comprising the amino acid sequence SEQ ID NO: 952, b. CDR-L2, comprising the amino acid sequence SEQ ID NO: 1494, and c. CDR-L3, comprising the amino acid sequence SEQ ID NO: 2036.

[1945] In one aspect, an antibody or antigen-binding fragment thereof is provided, wherein the antibody or antigen-binding fragment thereof comprises a VH as in any of the embodiments provided above, and a VL as in any of the embodiments provided above. In some embodiments, the antibody or antigen-binding fragment thereof comprises the VH amino acid sequence of SEQ ID NO: 139, and the VL amino acid sequence of SEQ ID NO: 410, optionally including post-translational modifications of those sequences.

### TLIV1004

[1946] In one aspect, the present disclosure provides an antibody or antigen-binding fragment thereof comprising at least one or both variable regions selected from: a. VH comprising the amino acid sequence of SEQ ID NO: 140 and a VL comprising the amino acid sequence of SEQ ID NO: 411.

[1947] In one aspect, the present disclosure provides an antibody or antigen-binding fragment thereof comprising at least one, two, three, four, five, or six CDRs selected from: a. CDR-H1 comprising the amino acid sequence of SEQ ID NO: 682, b. CDR-H2 comprising the amino acid sequence of SEQ ID NO: 1224, c. CDR-H3 comprising the amino acid sequence of SEQ ID NO: 1766, d. CDR-L1 comprising the amino acid sequence of SEQ ID NO: 953, e. CDR-L2 comprising the amino acid sequence of SEQ ID NO: 1495, and f. CDR-L3 comprising the amino acid sequence of SEQ ID NO: 2037.

[1948] In one aspect, the present disclosure provides an antibody or antigen-binding fragment thereof comprising a CDR-H3 comprising the amino acid sequence of SEQ ID NO: 1766, and a CDR-L3 comprising the amino acid sequence of SEQ ID NO: 2037.

[1949] In one aspect, the present disclosure provides an antibody or antigen-binding fragment thereof comprising at least one, at least two, or all three VH CDR sequences selected from: a. CDR-H1 comprising the amino acid sequence of SEQ ID NO: 682, b. CDR-H2 comprising the amino acid sequence of SEQ ID NO: 1224, c. CDR-H3 comprising the amino acid sequence of SEQ ID NO: 1766, and a VL comprising the amino acid sequence of SEQ ID NO: 411.

[1950] In one aspect, the present disclosure provides an antibody or antigen-binding fragment thereof comprising at least one, at least two, or all three VL CDR sequences selected from: a. CDR-L1 comprising the amino acid sequence of SEQ ID NO: 953, b. CDR-L2 comprising the amino acid sequence of SEQ ID NO: 1495, c. CDR-L3 comprising the amino acid sequence of SEQ ID NO: 2037, and a VH comprising the amino acid sequence of SEQ ID NO: 140.

[1951] In one aspect, an antibody or antigen-binding fragment thereof is provided, wherein the antibody or antigen-binding fragment thereof comprises a heavy chain variable domain (VH) having at least 90%, 91%, 92%, 93%, 94%, 95%, 96%, 97%, 98%, 99%, or 100% sequence identity to the amino acid sequence SEQ ID NO: 140. In some embodiments, a VH sequence having at least 90%, 91%, 92%, 93%, 94%, 95%, 96%, 97%, 98%, or 99% identity contains substitutions (e.g., conservative substitutions), insertions, or deletions relative to the reference sequence, but an antibody or antigen-binding fragment thereof comprising that sequence retains the ability to bind to same antigen as of the parent (e.g., cancer associated antigen). In some embodiments, a total of 1 to 10 amino acids have been substituted, inserted and/or deleted in the amino acid sequence SEQ ID NO: 140. In some embodiments, substitutions, insertions, or deletions occur in regions outside the CDRs (e.g., in the FRs). Optionally, the antibody or antigen-binding fragment thereof comprises the VH sequence SEQ ID NO: 140, including one or more post-translational modifications of that sequence. In a particular embodiment, the VH comprises one, two or three CDRs selected from: a. CDR-H1, comprising the amino acid sequence SEQ ID NO: 682, b. CDR-H2, comprising the amino acid sequence SEQ ID NO: 1224, and c. CDR-H3, comprising the amino acid sequence SEQ ID NO: 1766.

[1952] In one aspect, an antibody or antigen-binding fragment thereof is provided, wherein the antibody or antigen-binding fragment thereof comprises a light chain variable domain (VL) having at least 90%, 91%, 92%, 93%, 94%, 95%, 96%, 97%, 98%, 99%, or 100% sequence identity to the amino acid sequence SEQ ID NO: 411. In some embodiments, a VL sequence having at least 90%, 91%, 92%, 93%, 94%, 95%, 96%, 97%, 98%, or 99% identity contains substitutions (e.g., conservative substitutions), insertions, or deletions relative to the reference sequence, but an antibody or antigen-binding fragment thereof comprising that sequence retains the ability to bind to same antigen as the parent (e.g., cancer associated antigen). In some embodiments, a total of 1 to 10 amino acids have been substituted, inserted and/or deleted in the amino acid sequence SEQ ID NO: 411. In some embodiments, the substitutions, insertions, or deletions occur in regions outside the CDRs (e.g., in the FRs). Optionally, the antibody or antigen-binding fragment thereof comprises the VL sequence SEQ ID NO: 411, including one or more post-translational modifications of that sequence. In a particular embodiment, the VL comprises one, two or three CDRs selected from: a. CDR-L1, comprising the amino acid sequence SEQ ID NO: 953, b. CDR-L2, comprising the amino acid sequence SEQ ID NO: 1495, and c. CDR-L3, comprising the amino acid sequence SEQ ID NO: 2037.

[1953] In one aspect, an antibody or antigen-binding fragment thereof is provided, wherein the antibody or antigen-binding fragment thereof comprises a VH as in any of the embodiments provided above, and a VL as in any of the embodiments provided above. In some embodiments, the antibody or antigen-binding fragment thereof comprises the VH amino acid sequence of SEQ ID NO: 140, and the VL amino acid sequence of SEQ ID NO: 411, optionally including post-translational modifications of those sequences.

### TLUA1001

[1954] In one aspect, the present disclosure provides an antibody or antigen-binding fragment thereof comprising at least one or both variable regions selected from: a. VH comprising the amino acid sequence of SEQ ID NO: 141 and b. VL comprising the amino acid sequence of SEQ ID NO: 412.

[1955] In one aspect, the present disclosure provides an antibody or antigen-binding fragment thereof comprising at least one, two, three, four, five, or six CDRs selected from: a. CDR-H1 comprising the amino acid sequence of SEQ ID NO: 683, b. CDR-H2 comprising the amino acid sequence of SEQ ID NO: 1225, c. CDR-H3 comprising the amino acid sequence of SEQ ID NO: 1767, d. CDR-L1 comprising the amino acid sequence of SEQ ID NO: 954, e. CDR-L2 comprising the amino acid sequence of SEQ ID NO: 1496, and f. CDR-L3 comprising the amino acid sequence of SEQ ID NO: 2038.

[1956] In one aspect, the present disclosure provides an antibody or antigen-binding fragment thereof comprising a CDR-H3 comprising the amino acid sequence of SEQ ID NO: 1767, and a CDR-L3 comprising the amino acid sequence of SEQ ID NO: 2038.

[1957] In one aspect, the present disclosure provides an antibody or antigen-binding fragment thereof comprising at least one, at least two, or all three VH CDR sequences selected from: a. CDR-H1 comprising the amino acid sequence of SEQ ID NO: 683, b. CDR-H2 comprising the amino acid sequence of SEQ ID NO: 1225, c. CDR-H3 comprising the amino acid sequence of SEQ ID NO: 1767, and a VL comprising the amino acid sequence of SEQ ID NO: 412.

[1958] In one aspect, the present disclosure provides an antibody or antigen-binding fragment thereof comprising at least one, at least two, or all three VL CDR sequences selected from: a. CDR-L1 comprising the amino acid sequence of SEQ ID NO: 954, b. CDR-L2 comprising the amino acid sequence of SEQ ID NO: 1496, c. CDR-L3 comprising the amino acid sequence of SEQ ID NO: 2038, and a VH comprising the amino acid sequence of SEQ ID NO: 141.

[1959] In one aspect, an antibody or antigen-binding fragment thereof is provided, wherein the antibody or antigen-binding fragment thereof comprises a heavy chain variable domain (VH) having at least 90%, 91%, 92%, 93%, 94%, 95%, 96%, 97%, 98%, 99%, or 100% sequence identity to the amino acid sequence SEQ ID NO: 141. In some embodiments, a VH sequence having at least 90%, 91%, 92%, 93%, 94%, 95%, 96%, 97%, 98%, or 99% identity contains substitutions (e.g., conservative substitutions), insertions, or deletions relative to the reference sequence, but an antibody or antigen-binding fragment thereof comprising that sequence retains the ability to bind to same antigen as of the parent (e.g., cancer associated antigen). In some embodiments, a total of 1 to 10 amino acids have been substituted, inserted and/or deleted in the amino acid sequence SEQ ID NO: 141. In some embodiments, substitutions, insertions, or deletions occur in regions outside the CDRs (e.g., in the FRs). Optionally, the antibody or antigen-binding fragment thereof comprises the VH sequence SEQ ID NO: 141, including one or more post-translational modifications of that sequence. In a particular embodiment, the VH comprises one, two or three CDRs selected from: a. CDR-H1, comprising the amino acid sequence SEQ ID NO: 683, b. CDR-H2, comprising the amino acid sequence SEQ ID NO: 1225, and c. CDR-H3, comprising the amino acid sequence SEQ ID NO: 1767.

[1960] In one aspect, an antibody or antigen-binding fragment thereof is provided, wherein the antibody or antigen-binding fragment thereof comprises a light chain variable domain (VL) having at least 90%, 91%, 92%, 93%, 94%, 95%, 96%, 97%, 98%, 99%, or 100% sequence identity to the amino acid sequence SEQ ID NO: 412. In some embodiments, a VL sequence having at least 90%, 91%, 92%, 93%, 94%, 95%, 96%, 97%, 98%, or 99% identity contains substitutions (e.g., conservative substitutions), insertions, or deletions relative to the reference sequence, but an antibody or antigen-binding fragment thereof comprising that sequence retains the ability to bind to same antigen as the parent (e.g., cancer associated antigen). In some embodiments, a total of 1 to 10 amino acids have been substituted, inserted and/or deleted in the amino acid sequence SEQ ID NO: 412. In some embodiments, the substitutions, insertions, or deletions occur in regions outside the CDRs (e.g., in the FRs). Optionally, the antibody or antigen-binding fragment thereof comprises the VL sequence SEQ ID NO: 412, including one or more post-translational modifications of that sequence. In a particular embodiment, the VL comprises one, two or three CDRs selected from: a. CDR-L1, comprising the amino acid sequence SEQ ID NO: 954, b. CDR-L2, comprising the amino acid sequence SEQ ID NO: 1496, and c. CDR-L3, comprising the amino acid sequence SEQ ID NO: 2038.

[1961] In one aspect, an antibody or antigen-binding fragment thereof is provided, wherein the antibody or antigen-binding fragment thereof comprises a VH as in any of the embodiments provided above, and a VL as in any of the embodiments provided above. In some embodiments, the antibody or antigen-binding fragment thereof comprises the VH amino acid sequence of SEQ ID NO: 141, and the VL amino acid sequence of SEQ ID NO: 412, optionally including post-translational modifications of those sequences.

### TLUA1002

[1962] In one aspect, the present disclosure provides an antibody or antigen-binding fragment thereof comprising at least one or both variable regions selected from: a. VH comprising the amino acid sequence of SEQ ID NO: 142 and b. VL comprising the amino acid sequence of SEQ ID NO: 413.

[1963] In one aspect, the present disclosure provides an antibody or antigen-binding fragment thereof comprising at least one, two, three, four, five, or six CDRs selected from: a. CDR-H1 comprising the amino acid sequence of SEQ ID NO: 684, b. CDR-H2 comprising the amino acid sequence of SEQ ID NO: 1226, c. CDR-H3 comprising the amino acid sequence of SEQ ID NO: 1768, d. CDR-L1 comprising the amino acid sequence of SEQ ID NO: 955, e. CDR-L2 comprising the amino acid sequence of SEQ ID NO: 1497, and f. CDR-L3 comprising the amino acid sequence of SEQ ID NO: 2039.

[1964] In one aspect, the present disclosure provides an antibody or antigen-binding fragment thereof comprising a CDR-H3 comprising the amino acid sequence of SEQ ID NO: 1768, and a CDR-L3 comprising the amino acid sequence of SEQ ID NO: 2039.

[1965] In one aspect, the present disclosure provides an antibody or antigen-binding fragment thereof comprising at least one, at least two, or all three VH CDR sequences selected from: a. CDR-H1 comprising the amino acid sequence of SEQ ID NO: 684, b. CDR-H2 comprising the amino acid sequence of SEQ ID NO: 1226, c. CDR-H3 comprising the amino acid sequence of SEQ ID NO: 1768, and a VL comprising the amino acid sequence of SEQ ID NO: 413.

[1966] In one aspect, the present disclosure provides an antibody or antigen-binding fragment thereof comprising at least one, at least two, or all three VL CDR sequences selected from: a. CDR-L1 comprising the amino acid sequence of SEQ ID NO: 955, b. CDR-L2 comprising the amino acid sequence of SEQ ID NO: 1497, c. CDR-L3 comprising the amino acid sequence of SEQ ID NO: 2039, and a VH comprising the amino acid sequence of SEQ ID NO: 142.

[1967] In one aspect, an antibody or antigen-binding fragment thereof is provided, wherein the antibody or antigen-binding fragment thereof comprises a heavy chain variable domain (VH) having at least 90%, 91%, 92%, 93%, 94%, 95%, 96%, 97%, 98%, 99%, or 100% sequence identity to the amino acid sequence SEQ ID NO: 142. In some embodiments, a VH sequence having at least 90%, 91%, 92%, 93%, 94%, 95%, 96%, 97%, 98%, or 99% identity contains substitutions (e.g., conservative substitutions), insertions, or deletions relative to the reference sequence, but an antibody or antigen-binding fragment thereof comprising that sequence retains the ability to bind to same antigen as of the parent (e.g., cancer associated antigen). In some embodiments, a total of 1 to 10 amino acids have been substituted, inserted and/or deleted in the amino acid sequence SEQ ID NO: 142. In some embodiments, substitutions, insertions, or deletions occur in regions outside the CDRs (e.g., in the FRs). Optionally, the antibody or antigen-binding fragment thereof comprises the VH sequence SEQ ID NO: 142, including one or more post-translational modifications of that sequence. In a particular embodiment, the VH comprises one, two or three CDRs selected from: a. CDR-H1, comprising the amino acid sequence SEQ ID NO: 684, b. CDR-H2, comprising the amino acid sequence SEQ ID NO: 1226, and c. CDR-H3, comprising the amino acid sequence SEQ ID NO: 1768.

[1968] In one aspect, an antibody or antigen-binding fragment thereof is provided, wherein the antibody or antigen-binding fragment thereof comprises a light chain variable domain (VL) having at least 90%, 91%, 92%, 93%, 94%, 95%, 96%, 97%, 98%, 99%, or 100% sequence identity to the amino acid sequence SEQ ID NO: 413. In some embodiments, a VL sequence having at least 90%, 91%, 92%, 93%, 94%, 95%, 96%, 97%, 98%, or 99% identity contains substitutions (e.g., conservative substitutions), insertions, or deletions relative to the reference sequence, but an antibody or antigen-binding fragment thereof comprising that sequence retains the ability to bind to same antigen as the parent (e.g., cancer associated antigen). In some embodiments, a total of 1 to 10 amino acids have been substituted, inserted and/or deleted in the amino acid sequence SEQ ID NO: 413. In some embodiments, the substitutions, insertions, or deletions occur in regions outside the CDRs (e.g., in the FRs). Optionally, the antibody or antigen-binding fragment thereof comprises the VL sequence SEQ ID NO: 413, including one or more post-translational modifications of that sequence. In a particular embodiment, the VL comprises one, two or three CDRs selected from: a. CDR-L1, comprising the amino acid sequence SEQ ID NO: 955, b. CDR-L2, comprising the amino acid sequence SEQ ID NO: 1497, and c. CDR-L3, comprising the amino acid sequence SEQ ID NO: 2039.

[1969] In one aspect, an antibody or antigen-binding fragment thereof is provided, wherein the antibody or antigen-binding fragment thereof comprises a VH as in any of the embodiments provided above, and a VL as in any of the embodiments provided above. In some embodiments, the antibody or antigen-binding fragment thereof comprises the VH amino acid sequence of SEQ ID NO: 142, and the VL amino acid sequence of SEQ ID NO: 413, optionally including post-translational modifications of those sequences.

### TLUA1003

[1970] In one aspect, the present disclosure provides an antibody or antigen-binding fragment thereof comprising at least one or both variable regions selected from: a. VH comprising the amino acid sequence of SEQ ID NO: 143 and b. VL comprising the amino acid sequence of SEQ ID NO: 414.

[1971] In one aspect, the present disclosure provides an antibody or antigen-binding fragment thereof comprising at least one, two, three, four, five, or six CDRs selected from: a. CDR-H1 comprising the amino acid sequence of SEQ ID NO: 685, b. CDR-H2 comprising the amino acid sequence of SEQ ID NO: 1227, c. CDR-H3 comprising the amino acid sequence of SEQ ID NO: 1769, d. CDR-L1 comprising the amino acid sequence of SEQ ID NO: 956, e. CDR-L2 comprising the amino acid sequence of SEQ ID NO: 1498, and f. CDR-L3 comprising the amino acid sequence of SEQ ID NO: 2040.

[1972] In one aspect, the present disclosure provides an antibody or antigen-binding fragment thereof comprising a CDR-H3 comprising the amino acid sequence of SEQ ID NO: 1769, and a CDR-L3 comprising the amino acid sequence of SEQ ID NO: 2040.

[1973] In one aspect, the present disclosure provides an antibody or antigen-binding fragment thereof comprising at least one, at least two, or all three VH CDR sequences selected from: a. CDR-H1 comprising the amino acid sequence of SEQ ID NO: 685, b. CDR-H2 comprising the amino acid sequence of SEQ ID NO: 1227, c. CDR-H3 comprising the amino acid sequence of SEQ ID NO: 1769, and a VL comprising the amino acid sequence of SEQ ID NO: 414.

[1974] In one aspect, the present disclosure provides an antibody or antigen-binding fragment thereof comprising at least one, at least two, or all three VL CDR sequences selected from: a. CDR-L1 comprising the amino acid sequence of SEQ ID NO: 956, b. CDR-L2 comprising the amino acid sequence of SEQ ID NO: 1498, c. CDR-L3 comprising the amino acid sequence of SEQ ID NO: 2040, and a VH comprising the amino acid sequence of SEQ ID NO: 143.

[1975] In one aspect, an antibody or antigen-binding fragment thereof is provided, wherein the antibody or antigen-binding fragment thereof comprises a heavy chain variable domain (VH) having at least 90%, 91%, 92%, 93%, 94%, 95%, 96%, 97%, 98%, 99%, or 100% sequence identity to the amino acid sequence SEQ ID NO: 143. In some embodiments, a VH sequence having at least 90%, 91%, 92%, 93%, 94%, 95%, 96%, 97%, 98%, or 99% identity contains substitutions (e.g., conservative substitutions), insertions, or deletions relative to the reference sequence, but an antibody or antigen-binding fragment thereof comprising that sequence retains the ability to bind to same antigen as of the parent (e.g., cancer associated antigen). In some embodiments, a total of 1 to 10 amino acids have been substituted, inserted and/or deleted in the amino acid sequence SEQ ID NO: 143. In some embodiments, substitutions, insertions, or deletions occur in regions outside the CDRs (e.g., in the FRs). Optionally, the antibody or antigen-binding fragment thereof comprises the VH sequence SEQ ID NO: 143, including one or more post-translational modifications of that sequence. In a particular embodiment, the VH comprises one, two or three CDRs selected from: a. CDR-H1, comprising the amino acid sequence SEQ ID NO: 685, b. CDR-H2, comprising the amino acid sequence SEQ ID NO: 1227, and c. CDR-H3, comprising the amino acid sequence SEQ ID NO: 1769.

[1976] In one aspect, an antibody or antigen-binding fragment thereof is provided, wherein the antibody or antigen-binding fragment thereof comprises a light chain variable domain (VL) having at least 90%, 91%, 92%, 93%, 94%, 95%, 96%, 97%, 98%, 99%, or 100% sequence identity to the amino acid sequence SEQ ID NO: 414. In some embodiments, a VL sequence having at least 90%, 91%, 92%, 93%, 94%, 95%, 96%, 97%, 98%, or 99% identity contains substitutions (e.g., conservative substitutions), insertions, or deletions relative to the reference sequence, but an antibody or antigen-binding fragment thereof comprising that sequence retains the ability to bind to same antigen as the parent (e.g., cancer associated antigen). In some embodiments, a total of 1 to 10 amino acids have been substituted, inserted and/or deleted in the amino acid sequence SEQ ID NO: 414. In some embodiments, the substitutions, insertions, or deletions occur in regions outside the CDRs (e.g., in the FRs). Optionally, the antibody or antigen-binding fragment thereof comprises the VL sequence SEQ ID NO: 414, including one or more post-translational modifications of that sequence. In a particular embodiment, the VL comprises one, two or three CDRs selected from: a. CDR-L1, comprising the amino acid sequence SEQ ID NO: 956, b. CDR-L2, comprising the amino acid sequence SEQ ID NO: 1498, and c. CDR-L3, comprising the amino acid sequence SEQ ID NO: 2040.

[1977] In one aspect, an antibody or antigen-binding fragment thereof is provided, wherein the antibody or antigen-binding fragment thereof comprises a VH as in any of the embodiments provided above, and a VL as in any of the embodiments provided above. In some embodiments, the antibody or antigen-binding fragment thereof comprises the VH amino acid sequence of SEQ ID NO: 143, and the VL amino acid sequence of SEQ ID NO: 414, optionally including post-translational modifications of those sequences.

### TLUA1004

[1978] In one aspect, the present disclosure provides an antibody or antigen-binding fragment thereof comprising at least one or both variable regions selected from: a. VH comprising the amino acid sequence of SEQ ID NO: 144 and b. VL comprising the amino acid sequence of SEQ ID NO: 415.

[1979] In one aspect, the present disclosure provides an antibody or antigen-binding fragment thereof comprising at least one, two, three, four, five, or six CDRs selected from: a. CDR-H1 comprising the amino acid sequence of SEQ ID NO: 686, b. CDR-H2 comprising the amino acid sequence of SEQ ID NO: 1228, c. CDR-H3 comprising the amino acid sequence of SEQ ID NO: 1770, d. CDR-L1 comprising the amino acid sequence of SEQ ID NO: 957, e. CDR-L2 comprising the amino acid sequence of SEQ ID NO: 1499, and f. CDR-L3 comprising the amino acid sequence of SEQ ID NO: 2041.

[1980] In one aspect, the present disclosure provides an antibody or antigen-binding fragment thereof comprising a CDR-H3 comprising the amino acid sequence of SEQ ID NO: 1770, and a CDR-L3 comprising the amino acid sequence of SEQ ID NO: 2041.

[1981] In one aspect, the present disclosure provides an antibody or antigen-binding fragment thereof comprising at least one, at least two, or all three VH CDR sequences selected from: a. CDR-H1 comprising the amino acid sequence of SEQ ID NO: 686, b. CDR-H2 comprising the amino acid sequence of SEQ ID NO: 1228, c. CDR-H3 comprising the amino acid sequence of SEQ ID NO: 1770, and a VL comprising the amino acid sequence of SEQ ID NO: 415.

[1982] In one aspect, the present disclosure provides an antibody or antigen-binding fragment thereof comprising at least one, at least two, or all three VL CDR sequences selected from: a. CDR-L1 comprising the amino acid sequence of SEQ ID NO: 957, b. CDR-L2 comprising the amino acid sequence of SEQ ID NO: 1499, c. CDR-L3 comprising the amino acid sequence of SEQ ID NO: 2041, and a VH comprising the amino acid sequence of SEQ ID NO: 144.

[1983] In one aspect, an antibody or antigen-binding fragment thereof is provided, wherein the antibody or antigen-binding fragment thereof comprises a heavy chain variable domain (VH) having at least 90%, 91%, 92%, 93%, 94%, 95%, 96%, 97%, 98%, 99%, or 100% sequence identity to the amino acid sequence SEQ ID NO: 144. In some embodiments, a VH sequence having at least 90%, 91%, 92%, 93%, 94%, 95%, 96%, 97%, 98%, or 99% identity contains substitutions (e.g., conservative substitutions), insertions, or deletions relative to the reference sequence, but an antibody or antigen-binding fragment thereof comprising that sequence retains the ability to bind to same antigen as of the parent (e.g., cancer associated antigen). In some embodiments, a total of 1 to 10 amino acids have been substituted, inserted and/or deleted in the amino acid sequence SEQ ID NO: 144. In some embodiments, substitutions, insertions, or deletions occur in regions outside the CDRs (e.g., in the FRs). Optionally, the antibody or antigen-binding fragment thereof comprises the VH sequence SEQ ID NO: 144, including one or more post-translational modifications of that sequence. In a particular embodiment, the VH comprises one, two or three CDRs selected from: a. CDR-H1, comprising the amino acid sequence SEQ ID NO: 686, b. CDR-H2, comprising the amino acid sequence SEQ ID NO: 1228, and c. CDR-H3, comprising the amino acid sequence SEQ ID NO: 1770.

[1984] In one aspect, an antibody or antigen-binding fragment thereof is provided, wherein the antibody or antigen-binding fragment thereof comprises a light chain variable domain (VL) having at least 90%, 91%, 92%, 93%, 94%, 95%, 96%, 97%, 98%, 99%, or 100% sequence identity to the amino acid sequence SEQ ID NO: 415. In some embodiments, a VL sequence having at least 90%, 91%, 92%, 93%, 94%, 95%, 96%, 97%, 98%, or 99% identity contains substitutions (e.g., conservative substitutions), insertions, or deletions relative to the reference sequence, but an antibody or antigen-binding fragment thereof comprising that sequence retains the ability to bind to same antigen as the parent (e.g., cancer associated antigen). In some embodiments, a total of 1 to 10 amino acids have been substituted, inserted and/or deleted in the amino acid sequence SEQ ID NO: 415. In some embodiments, the substitutions, insertions, or deletions occur in regions outside the CDRs (e.g., in the FRs). Optionally, the antibody or antigen-binding fragment thereof comprises the VL sequence SEQ ID NO: 415, including one or more post-translational modifications of that sequence. In a particular embodiment, the VL comprises one, two or three CDRs selected from: a. CDR-L1, comprising the amino acid sequence SEQ ID NO: 957, b. CDR-L2, comprising the amino acid sequence SEQ ID NO: 1499, and c. CDR-L3, comprising the amino acid sequence SEQ ID NO: 2041.

[1985] In one aspect, an antibody or antigen-binding fragment thereof is provided, wherein the antibody or antigen-binding fragment thereof comprises a VH as in any of the embodiments provided above, and a VL as in any of the embodiments provided above. In some embodiments, the antibody or antigen-binding fragment thereof comprises the VH amino acid sequence of SEQ ID NO: 144, and the VL amino acid sequence of SEQ ID NO: 415, optionally including post-translational modifications of those sequences.

[1986] TLUA1005

[1987] In one aspect, the present disclosure provides an antibody or antigen-binding fragment thereof comprising at least one or both variable regions selected from: a. VH comprising the amino acid sequence of SEQ ID NO: 145, and b. VL comprising the amino acid sequence of SEQ ID NO: 416.

[1988] In one aspect, the present disclosure provides an antibody or antigen-binding fragment thereof comprising at least one, two, three, four, five, or six CDRs selected from: a. CDR-H1 comprising the amino acid sequence of SEQ ID NO: 687, b. CDR-H2 comprising the amino acid sequence of SEQ ID NO: 1229, c. CDR-H3 comprising the amino acid sequence of SEQ ID NO: 1771, d. CDR-L1 comprising the amino acid sequence of SEQ ID NO: 958, e. CDR-L2 comprising the amino acid sequence of SEQ ID NO: 1500, and f. CDR-L3 comprising the amino acid sequence of SEQ ID NO: 2042.

[1989] In one aspect, the present disclosure provides an antibody or antigen-binding fragment thereof comprising a CDR-H3 comprising the amino acid sequence of SEQ ID NO: 1771, and a CDR-L3 comprising the amino acid sequence of SEQ ID NO: 2042.

[1990] In one aspect, the present disclosure provides an antibody or antigen-binding fragment thereof comprising at least one, at least two, or all three VH CDR sequences selected from: a. CDR-H1 comprising the amino acid sequence of SEQ ID NO: 687, b. CDR-H2 comprising the amino acid sequence of SEQ ID NO: 1229, c. CDR-H3 comprising the amino acid sequence of SEQ ID NO: 1771, and a VL comprising the amino acid sequence of SEQ ID NO: 416.

[1991] In one aspect, the present disclosure provides an antibody or antigen-binding fragment thereof comprising at least one, at least two, or all three VL CDR sequences selected from: a. CDR-L1 comprising the amino acid sequence of SEQ ID NO: 958, b. CDR-L2 comprising the amino acid sequence of SEQ ID NO: 1500, c. CDR-L3 comprising the amino acid sequence of SEQ ID NO: 2042, and a VH comprising the amino acid sequence of SEQ ID NO: 145.

[1992] In one aspect, an antibody or antigen-binding fragment thereof is provided, wherein the antibody or antigen-binding fragment thereof comprises a heavy chain variable domain (VH) having at least 90%, 91%, 92%, 93%, 94%, 95%, 96%, 97%, 98%, 99%, or 100% sequence identity to the amino acid sequence SEQ ID NO: 145. In some embodiments, a VH sequence having at least 90%, 91%, 92%, 93%, 94%, 95%, 96%, 97%, 98%, or 99% identity contains substitutions (e.g., conservative substitutions), insertions, or deletions relative to the reference sequence, but an antibody or antigen-binding fragment thereof comprising that sequence retains the ability to bind to same antigen as of the parent (e.g., cancer associated antigen). In some embodiments, a total of 1 to 10 amino acids have been substituted, inserted and/or deleted in the amino acid sequence SEQ ID NO: 145. In some embodiments, substitutions, insertions, or deletions occur in regions outside the CDRs (e.g., in the FRs). Optionally, the antibody or antigen-binding fragment thereof comprises the VH sequence SEQ ID NO: 145, including one or more post-translational modifications of that sequence. In a particular embodiment, the VH comprises one, two or three CDRs selected from: a. CDR-H1, comprising the amino acid sequence SEQ ID NO: 687, b. CDR-H2, comprising the amino acid sequence SEQ ID NO: 1229, and c. CDR-H3, comprising the amino acid sequence SEQ ID NO: 1771.

[1993] In one aspect, an antibody or antigen-binding fragment thereof is provided, wherein the antibody or antigen-binding fragment thereof comprises a light chain variable domain (VL) having at least 90%, 91%, 92%, 93%, 94%, 95%, 96%, 97%, 98%, 99%, or 100% sequence identity to the amino acid sequence SEQ ID NO: 416. In some embodiments, a VL sequence having at least 90%, 91%, 92%, 93%, 94%, 95%, 96%, 97%, 98%, or 99% identity contains substitutions (e.g., conservative substitutions), insertions, or deletions relative to the reference sequence, but an antibody or antigen-binding fragment thereof comprising that sequence retains the ability to bind to same antigen as the parent (e.g., cancer associated antigen). In some embodiments, a total of 1 to 10 amino acids have been substituted, inserted and/or deleted in the amino acid sequence SEQ ID NO: 416. In some embodiments, the substitutions, insertions, or deletions occur in regions outside the CDRs (e.g., in the FRs). Optionally, the antibody or antigen-binding fragment thereof comprises the VL sequence SEQ ID NO: 416, including one or more post-translational modifications of that sequence. In a particular embodiment, the VL comprises one, two or three CDRs selected from: a. CDR-L1, comprising the amino acid sequence SEQ ID NO: 958, b. CDR-L2, comprising the amino acid sequence SEQ ID NO: 1500, and c. CDR-L3, comprising the amino acid sequence SEQ ID NO: 2042.

[1994] In one aspect, an antibody or antigen-binding fragment thereof is provided, wherein the antibody or antigen-binding fragment thereof comprises a VH as in any of the embodiments provided above, and a VL as in any of the embodiments provided above. In some embodiments, the antibody or antigen-binding fragment thereof comprises the VH amino acid sequence of SEQ ID NO: 145, and the VL amino acid sequence of SEQ ID NO: 416, optionally including post-translational modifications of those sequences.

### TLUA1006

[1995] In one aspect, the present disclosure provides an antibody or antigen-binding fragment thereof comprising at least one or both variable regions selected from: a. VH comprising the amino acid sequence of SEQ ID NO: 146 and b. VL comprising the amino acid sequence of SEQ ID NO: 417.

[1996] In one aspect, the present disclosure provides an antibody or antigen-binding fragment thereof comprising at least one, two, three, four, five, or six CDRs selected from: a. CDR-H1 comprising the amino acid sequence of SEQ ID NO: 688, b. CDR-H2 comprising the amino acid sequence of SEQ ID NO: 1230, c. CDR-H3 comprising the amino acid sequence of SEQ ID NO: 1772, d. CDR-L1 comprising the amino acid sequence of SEQ ID NO: 959, e. CDR-L2 comprising the amino acid sequence of SEQ ID NO: 1501, and f. CDR-L3 comprising the amino acid sequence of SEQ ID NO: 2043.

[1997] In one aspect, the present disclosure provides an antibody or antigen-binding fragment thereof comprising a CDR-H3 comprising the amino acid sequence of SEQ ID NO: 1772 and a CDR-L3 comprising the amino acid sequence of SEQ ID NO: 2043.

[1998] In one aspect, the present disclosure provides an antibody or antigen-binding fragment thereof comprising at least one, at least two, or all three VH CDR sequences selected from: a. CDR-H1 comprising the amino acid sequence of SEQ ID NO: 688, b. CDR-H2 comprising the amino acid sequence of SEQ ID NO: 1230, c. CDR-H3 comprising the amino acid sequence of SEQ ID NO: 1772, and a VL comprising the amino acid sequence of SEQ ID NO: 417.

[1999] In one aspect, the present disclosure provides an antibody or antigen-binding fragment thereof comprising at least one, at least two, or all three VL CDR sequences selected from: a. CDR-L1 comprising the amino acid sequence of SEQ ID NO: 959, b. CDR-L2 comprising the amino acid sequence of SEQ ID NO: 1501, c. CDR-L3 comprising the amino acid sequence of SEQ ID NO: 2043, and a VH comprising the amino acid sequence of SEQ ID NO: 146.

[2000] In one aspect, an antibody or antigen-binding fragment thereof is provided, wherein the antibody or antigen-binding fragment thereof comprises a heavy chain variable domain (VH) having at least 90%, 91%, 92%, 93%, 94%, 95%, 96%, 97%, 98%, 99%, or 100% sequence identity to the amino acid sequence SEQ ID NO: 146. In some embodiments, a VH sequence having at least 90%, 91%, 92%, 93%, 94%, 95%, 96%, 97%, 98%, or 99% identity contains substitutions (e.g., conservative substitutions), insertions, or deletions relative to the reference sequence, but an antibody or antigen-binding fragment thereof comprising that sequence retains the ability to bind to same antigen as of the parent (e.g., cancer associated antigen). In some embodiments, a total of 1 to 10 amino acids have been substituted, inserted and/or deleted in the amino acid sequence SEQ ID NO: 146. In some embodiments, substitutions, insertions, or deletions occur in regions outside the CDRs (e.g., in the FRs). Optionally, the antibody or antigen-binding fragment thereof comprises the VH sequence SEQ ID NO: 146, including one or more post-translational modifications of that sequence. In a particular embodiment, the VH comprises one, two or three CDRs selected from: a. CDR-H1, comprising the amino acid sequence SEQ ID NO: 688, b. CDR-H2, comprising the amino acid sequence SEQ ID NO: 1230, and c. CDR-H3, comprising the amino acid sequence SEQ ID NO: 1772.

[2001] In one aspect, an antibody or antigen-binding fragment thereof is provided, wherein the antibody or antigen-binding fragment thereof comprises a light chain variable domain (VL) having at least 90%, 91%, 92%, 93%, 94%, 95%, 96%, 97%, 98%, 99%, or 100% sequence identity to the amino acid sequence SEQ ID NO: 417. In some embodiments, a VL sequence having at least 90%, 91%, 92%, 93%, 94%, 95%, 96%, 97%, 98%, or 99% identity contains substitutions (e.g., conservative substitutions), insertions, or deletions relative to the reference sequence, but an antibody or antigen-binding fragment thereof comprising that sequence retains the ability to bind to same antigen as the parent (e.g., cancer associated antigen). In some embodiments, a total of 1 to 10 amino acids have been substituted, inserted and/or deleted in the amino acid sequence SEQ ID NO: 417. In some embodiments, the substitutions, insertions, or deletions occur in regions outside the CDRs (e.g., in the FRs). Optionally, the antibody or antigen-binding fragment thereof comprises the VL sequence SEQ ID NO: 417, including one or more post-translational modifications of that sequence. In a particular embodiment, the VL comprises one, two or three CDRs selected from: a. CDR-L1, comprising the amino acid sequence SEQ ID NO: 959, b. CDR-L2, comprising the amino acid sequence SEQ ID NO: 1501, and c. CDR-L3, comprising the amino acid sequence SEQ ID NO: 2043.

[2002] In one aspect, an antibody or antigen-binding fragment thereof is provided, wherein the antibody or antigen-binding fragment thereof comprises a VH as in any of the embodiments provided above, and a VL as in any of the embodiments provided above. In some embodiments, the antibody or antigen-binding fragment thereof comprises the VH amino acid sequence of SEQ ID NO: 146, and the VL amino acid sequence of SEQ ID NO: 417, optionally including post-translational modifications of those sequences.

### TLUA1007

[2003] In one aspect, the present disclosure provides an antibody or antigen-binding fragment thereof comprising at least one or both variable regions selected from: a. VH comprising the amino acid sequence of SEQ ID NO: 147 and b. VL comprising the amino acid sequence of SEQ ID NO: 418.

[2004] In one aspect, the present disclosure provides an antibody or antigen-binding fragment thereof comprising at least one, two, three, four, five, or six CDRs selected from: a. CDR-H1 comprising the amino acid sequence of SEQ ID NO: 689, b. CDR-H2 comprising the amino acid sequence of SEQ ID NO: 1231, c. CDR-H3 comprising the amino acid sequence of SEQ ID NO: 1773, d. CDR-L1 comprising the amino acid sequence of SEQ ID NO: 960, e. CDR-L2 comprising the amino acid sequence of SEQ ID NO: 1502, and f. CDR-L3 comprising the amino acid sequence of SEQ ID NO: 2044.

[2005] In one aspect, the present disclosure provides an antibody or antigen-binding fragment thereof comprising a CDR-H3 comprising the amino acid sequence of SEQ ID NO: 1773, and a CDR-L3 comprising the amino acid sequence of SEQ ID NO: 2044.

[2006] In one aspect, the present disclosure provides an antibody or antigen-binding fragment thereof comprising at least one, at least two, or all three VH CDR sequences selected from: a. CDR-H1 comprising the amino acid sequence of SEQ ID NO: 689, b. CDR-H2 comprising the amino acid sequence of SEQ ID NO: 1231, c. CDR-H3 comprising the amino acid sequence of SEQ ID NO: 1773, and a VL comprising the amino acid sequence of SEQ ID NO: 418.

[2007] In one aspect, the present disclosure provides an antibody or antigen-binding fragment thereof comprising at least one, at least two, or all three VL CDR sequences selected from: a. CDR-L1 comprising the amino acid sequence of SEQ ID NO: 960, b. CDR-L2 comprising the amino acid sequence of SEQ ID NO: 1502, c. CDR-L3 comprising the amino acid sequence of SEQ ID NO: 2044, and a VH comprising the amino acid sequence of SEQ ID NO: 147.

[2008] In one aspect, an antibody or antigen-binding fragment thereof is provided, wherein the antibody or antigen-binding fragment thereof comprises a heavy chain variable domain (VH) having at least 90%, 91%, 92%, 93%, 94%, 95%, 96%, 97%, 98%, 99%, or 100% sequence identity to the amino acid sequence SEQ ID NO: 147. In some embodiments, a VH sequence having at least 90%, 91%, 92%, 93%, 94%, 95%, 96%, 97%, 98%, or 99% identity contains substitutions (e.g., conservative substitutions), insertions, or deletions relative to the reference sequence, but an antibody or antigen-binding fragment thereof comprising that sequence retains the ability to bind to same antigen as of the parent (e.g., cancer associated antigen). In some embodiments, a total of 1 to 10 amino acids have been substituted, inserted and/or deleted in the amino acid sequence SEQ ID NO: 147. In some embodiments, substitutions, insertions, or deletions occur in regions outside the CDRs (e.g., in the FRs). Optionally, the antibody or antigen-binding fragment thereof comprises the VH sequence SEQ ID NO: 147, including one or more post-translational modifications of that sequence. In a particular embodiment, the VH comprises one, two or three CDRs selected from: a. CDR-H1, comprising the amino acid sequence SEQ ID NO: 689, b. CDR-H2, comprising the amino acid sequence SEQ ID NO: 1231, and c. CDR-H3, comprising the amino acid sequence SEQ ID NO: 1773.

[2009] In one aspect, an antibody or antigen-binding fragment thereof is provided, wherein the antibody or antigen-binding fragment thereof comprises a light chain variable domain (VL) having at least 90%, 91%, 92%, 93%, 94%, 95%, 96%, 97%, 98%, 99%, or 100% sequence identity to the amino acid sequence SEQ ID NO: 418. In some embodiments, a VL sequence having at least 90%, 91%, 92%, 93%, 94%, 95%, 96%, 97%, 98%, or 99% identity contains substitutions (e.g., conservative substitutions), insertions, or deletions relative to the reference sequence, but an antibody or antigen-binding fragment thereof comprising that sequence retains the ability to bind to same antigen as the parent (e.g., cancer associated antigen). In some embodiments, a total of 1 to 10 amino acids have been substituted, inserted and/or deleted in the amino acid sequence SEQ ID NO: 418. In some embodiments, the substitutions, insertions, or deletions occur in regions outside the CDRs (e.g., in the FRs). Optionally, the antibody or antigen-binding fragment thereof comprises the VL sequence SEQ ID NO: 418, including one or more post-translational modifications of that sequence. In a particular embodiment, the VL comprises one, two or three CDRs selected from: a. CDR-L1, comprising the amino acid sequence SEQ ID NO: 960, b. CDR-L2, comprising the amino acid sequence SEQ ID NO: 1502, and c. CDR-L3, comprising the amino acid sequence SEQ ID NO: 2044.

[2010] In one aspect, an antibody or antigen-binding fragment thereof is provided, wherein the antibody or antigen-binding fragment thereof comprises a VH as in any of the embodiments provided above, and a VL as in any of the embodiments provided above. In some embodiments, the antibody or antigen-binding fragment thereof comprises the VH amino acid sequence of SEQ ID NO: 147, and the VL amino acid sequence of SEQ ID NO: 418, optionally including post-translational modifications of those sequences.

### TLUA1008

[2011] In one aspect, the present disclosure provides an antibody or antigen-binding fragment thereof comprising at least one or both variable regions selected from: a. VH comprising the amino acid sequence of SEQ ID NO: 148 and b. VL comprising the amino acid sequence of SEQ ID NO: 419.

[2012] In one aspect, the present disclosure provides an antibody or antigen-binding fragment thereof comprising at least one, two, three, four, five, or six CDRs selected from: a. CDR-H1 comprising the amino acid sequence of SEQ ID NO: 690, b. CDR-H2 comprising the amino acid sequence of SEQ ID NO: 1232, c. CDR-H3 comprising the amino acid sequence of SEQ ID NO: 1774, d. CDR-L1 comprising the amino acid sequence of SEQ ID NO: 961, e. CDR-L2 comprising the amino acid sequence of SEQ ID NO: 1503, and f. CDR-L3 comprising the amino acid sequence of SEQ ID NO: 2045.

[2013] In one aspect, the present disclosure provides an antibody or antigen-binding fragment thereof comprising a CDR-H3 comprising the amino acid sequence of SEQ ID NO: 1774, and a CDR-L3 comprising the amino acid sequence of SEQ ID NO: 2045.

[2014] In one aspect, the present disclosure provides an antibody or antigen-binding fragment thereof comprising at least one, at least two, or all three VH CDR sequences selected from: a. CDR-H1 comprising the amino acid sequence of SEQ ID NO: 690, b. CDR-H2 comprising the amino acid sequence of SEQ ID NO: 1232, c. CDR-H3 comprising the amino acid sequence of SEQ ID NO: 1774, and VL comprising the amino acid sequence of SEQ ID NO: 419.

[2015] In one aspect, the present disclosure provides an antibody or antigen-binding fragment thereof comprising at least one, at least two, or all three VL CDR sequences selected from: a. CDR-L1 comprising the amino acid sequence of SEQ ID NO: 961, b. CDR-L2 comprising the amino acid sequence of SEQ ID NO: 1503, c. CDR-L3 comprising the amino acid sequence of SEQ ID NO: 2045, and a VH comprising the amino acid sequence of SEQ ID NO: 148.

[2016] In one aspect, an antibody or antigen-binding fragment thereof is provided, wherein the antibody or antigen-binding fragment thereof comprises a heavy chain variable domain (VH) having at least 90%, 91%, 92%, 93%, 94%, 95%, 96%, 97%, 98%, 99%, or 100% sequence identity to the amino acid sequence SEQ ID NO: 148. In some embodiments, a VH sequence having at least 90%, 91%, 92%, 93%, 94%, 95%, 96%, 97%, 98%, or 99% identity contains substitutions (e.g., conservative substitutions), insertions, or deletions relative to the reference sequence, but an antibody or antigen-binding fragment thereof comprising that sequence retains the ability to bind to same antigen as of the parent (e.g., cancer associated antigen). In some embodiments, a total of 1 to 10 amino acids have been substituted, inserted and/or deleted in the amino acid sequence SEQ ID NO: 148. In some embodiments, substitutions, insertions, or deletions occur in regions outside the CDRs (e.g., in the FRs). Optionally, the antibody or antigen-binding fragment thereof comprises the VH sequence SEQ ID NO: 148, including one or more post-translational modifications of that sequence. In a particular embodiment, the VH comprises one, two or three CDRs selected from: a. CDR-H1, comprising the amino acid sequence SEQ ID NO: 690, b. CDR-H2, comprising the amino acid sequence SEQ ID NO: 1232, and c. CDR-H3, comprising the amino acid sequence SEQ ID NO: 1774.

[2017] In one aspect, an antibody or antigen-binding fragment thereof is provided, wherein the antibody or antigen-binding fragment thereof comprises a light chain variable domain (VL) having at least 90%, 91%, 92%, 93%, 94%, 95%, 96%, 97%, 98%, 99%, or 100% sequence identity to the amino acid sequence SEQ ID NO: 419. In some embodiments, a VL sequence having at least 90%, 91%, 92%, 93%, 94%, 95%, 96%, 97%, 98%, or 99% identity contains substitutions (e.g., conservative substitutions), insertions, or deletions relative to the reference sequence, but an antibody or antigen-binding fragment thereof comprising that sequence retains the ability to bind to same antigen as the parent (e.g., cancer associated antigen). In some embodiments, a total of 1 to 10 amino acids have been substituted, inserted and/or deleted in the amino acid sequence SEQ ID NO: 419. In some embodiments, the substitutions, insertions, or deletions occur in regions outside the CDRs (e.g., in the FRs). Optionally, the antibody or antigen-binding fragment thereof comprises the VL sequence SEQ ID NO: 419, including one or more post-translational modifications of that sequence. In a particular embodiment, the VL comprises one, two or three CDRs selected from: a. CDR-L1, comprising the amino acid sequence SEQ ID NO: 961, b. CDR-L2, comprising the amino acid sequence SEQ ID NO: 1503, and c. CDR-L3, comprising the amino acid sequence SEQ ID NO: 2045.

[2018] In one aspect, an antibody or antigen-binding fragment thereof is provided, wherein the antibody or antigen-binding fragment thereof comprises a VH as in any of the embodiments provided above, and a VL as in any of the embodiments provided above. In some embodiments, the antibody or antigen-binding fragment thereof comprises the VH amino acid sequence of SEQ ID NO: 148, and the VL amino acid sequence of SEQ ID NO: 419, optionally including post-translational modifications of those sequences.

### TLUA1009

[2019] In one aspect, the present disclosure provides an antibody or antigen-binding fragment thereof comprising at least one or both variable regions selected from: a. VH comprising the amino acid sequence of SEQ ID NO: 149 and b. VL comprising the amino acid sequence of SEQ ID NO: 420.

[2020] In one aspect, the present disclosure provides an antibody or antigen-binding fragment thereof comprising at least one, two, three, four, five, or six CDRs selected from: a CDR-H1 comprising the amino acid sequence of SEQ ID NO: 691, b. CDR-H2 comprising the amino acid sequence of SEQ ID NO: 1233, c. CDR-H3 comprising the amino acid sequence of SEQ ID NO: 1775, d. CDR-L1 comprising the amino acid sequence of SEQ ID NO: 962, e. CDR-L2 comprising the amino acid sequence of SEQ ID NO: 1504, and f. CDR-L3 comprising the amino acid sequence of SEQ ID NO: 2046.

[2021] In one aspect, the present disclosure provides an antibody or antigen-binding fragment thereof comprising a CDR-H3 comprising the amino acid sequence of SEQ ID NO: 1775, and a CDR-L3 comprising the amino acid sequence of SEQ ID NO: 2046.

[2022] In one aspect, the present disclosure provides an antibody or antigen-binding fragment thereof comprising at least one, at least two, or all three VH CDR sequences selected from: a. CDR-H1 comprising the amino acid sequence of SEQ ID NO: 691, b. CDR-H2 comprising the amino acid sequence of SEQ ID NO: 1233, c. CDR-H3 comprising the amino acid sequence of SEQ ID NO: 1775, and a VL comprising the amino acid sequence of SEQ ID NO: 420.

[2023] In one aspect, the present disclosure provides an antibody or antigen-binding fragment thereof comprising at least one, at least two, or all three VL CDR sequences selected from: a. CDR-L1 comprising the amino acid sequence of SEQ ID NO: 962, b. CDR-L2 comprising the amino acid sequence of SEQ ID NO: 1504, c. CDR-L3 comprising the amino acid sequence of SEQ ID NO: 2046, and a VH comprising the amino acid sequence of SEQ ID NO: 149.

[2024] In one aspect, an antibody or antigen-binding fragment thereof is provided, wherein the antibody or antigen-binding fragment thereof comprises a heavy chain variable domain (VH) having at least 90%, 91%, 92%, 93%, 94%, 95%, 96%, 97%, 98%, 99%, or 100% sequence identity to the amino acid sequence SEQ ID NO: 149. In some embodiments, a VH sequence having at least 90%, 91%, 92%, 93%, 94%, 95%, 96%, 97%, 98%, or 99% identity contains substitutions (e.g., conservative substitutions), insertions, or deletions relative to the reference sequence, but an antibody or antigen-binding fragment thereof comprising that sequence retains the ability to bind to same antigen as of the parent (e.g., cancer associated antigen). In some embodiments, a total of 1 to 10 amino acids have been substituted, inserted and/or deleted in the amino acid sequence SEQ ID NO: 149. In some embodiments, substitutions, insertions, or deletions occur in regions outside the CDRs (e.g., in the FRs). Optionally, the antibody or antigen-binding fragment thereof comprises the VH sequence SEQ ID NO: 149, including one or more post-translational modifications of that sequence. In a particular embodiment, the VH comprises one, two or three CDRs selected from: a. CDR-H1, comprising the amino acid sequence SEQ ID NO: 691, b. CDR-H2, comprising the amino acid sequence SEQ ID NO: 1233, and c. CDR-H3, comprising the amino acid sequence SEQ ID NO: 1775.

[2025] In one aspect, an antibody or antigen-binding fragment thereof is provided, wherein the antibody or antigen-binding fragment thereof comprises a light chain variable domain (VL) having at least 90%, 91%, 92%, 93%, 94%, 95%, 96%, 97%, 98%, 99%, or 100% sequence identity to the amino acid sequence SEQ ID NO: 420. In some embodiments, a VL sequence having at least 90%, 91%, 92%, 93%, 94%, 95%, 96%, 97%, 98%, or 99% identity contains substitutions (e.g., conservative substitutions), insertions, or deletions relative to the reference sequence, but an antibody or antigen-binding fragment thereof comprising that sequence retains the ability to bind to same antigen as the parent (e.g., cancer associated antigen). In some embodiments, a total of 1 to 10 amino acids have been substituted, inserted and/or deleted in the amino acid sequence SEQ ID NO: 420. In some embodiments, the substitutions, insertions, or deletions occur in regions outside the CDRs (e.g., in the FRs). Optionally, the antibody or antigen-binding fragment thereof comprises the VL sequence SEQ ID NO: 420, including one or more post-translational modifications of that sequence. In a particular embodiment, the VL comprises one, two or three CDRs selected from: a. CDR-L1, comprising the amino acid sequence SEQ ID NO: 962, b. CDR-L2, comprising the amino acid sequence SEQ ID NO: 1504, and c. CDR-L3, comprising the amino acid sequence SEQ ID NO: 2046.

[2026] In one aspect, an antibody or antigen-binding fragment thereof is provided, wherein the antibody or antigen-binding fragment thereof comprises a VH as in any of the embodiments provided above, and a VL as in any of the embodiments provided above. In some embodiments, the antibody or antigen-binding fragment thereof comprises the VH amino acid sequence of SEQ ID NO: 149, and the VL amino acid sequence of SEQ ID NO: 420, optionally including post-translational modifications of those sequences.

[2027] TLUA1010

[2028] In one aspect, the present disclosure provides an antibody or antigen-binding fragment thereof comprising at least one or both variable regions selected from: a. VH comprising the amino acid sequence of SEQ ID NO: 150 and b. VL comprising the amino acid sequence of SEQ ID NO: 421.

[2029] In one aspect, the present disclosure provides an antibody or antigen-binding fragment thereof comprising at least one, two, three, four, five, or six CDRs selected from: a. CDR-H1 comprising the amino acid sequence of SEQ ID NO: 692, b. CDR-H2 comprising the amino acid sequence of SEQ ID NO: 1234, c. CDR-H3 comprising the amino acid sequence of SEQ ID NO: 1776, d. CDR-L1 comprising the amino acid sequence of SEQ ID NO: 963, e. CDR-L2 comprising the amino acid sequence of SEQ ID NO: 1505, and f. CDR-L3 comprising the amino acid sequence of SEQ ID NO: 2047.

[2030] In one aspect, the present disclosure provides an antibody or antigen-binding fragment thereof comprising a CDR-H3 comprising the amino acid sequence of SEQ ID NO: 1776 and a CDR-L3 comprising the amino acid sequence of SEQ ID NO: 2047.

[2031] In one aspect, the present disclosure provides an antibody or antigen-binding fragment thereof comprising at least one, at least two, or all three VH CDR sequences selected from: a. CDR-H1 comprising the amino acid sequence of SEQ ID NO: 692, b. CDR-H2 comprising the amino acid sequence of SEQ ID NO: 1234, c. CDR-H3 comprising the amino acid sequence of SEQ ID NO: 1776, and a VL comprising the amino acid sequence of SEQ ID NO: 421.

[2032] In one aspect, the present disclosure provides an antibody or antigen-binding fragment thereof comprising at least one, at least two, or all three VL CDR sequences selected from: a. CDR-L1 comprising the amino acid sequence of SEQ ID NO: 963, b. CDR-L2 comprising the amino acid sequence of SEQ ID NO: 1505, c. CDR-L3 comprising the amino acid sequence of SEQ ID NO: 2047, and a VH comprising the amino acid sequence of SEQ ID NO: 150.

[2033] In one aspect, an antibody or antigen-binding fragment thereof is provided, wherein the antibody or antigen-binding fragment thereof comprises a heavy chain variable domain (VH) having at least 90%, 91%, 92%, 93%, 94%, 95%, 96%, 97%, 98%, 99%, or 100% sequence identity to the amino acid sequence SEQ ID NO: 150. In some embodiments, a VH sequence having at least 90%, 91%, 92%, 93%, 94%, 95%, 96%, 97%, 98%, or 99% identity contains substitutions (e.g., conservative substitutions), insertions, or deletions relative to the reference sequence, but an antibody or antigen-binding fragment thereof comprising that sequence retains the ability to bind to same antigen as of the parent (e.g., cancer associated antigen). In some embodiments, a total of 1 to 10 amino acids have been substituted, inserted and/or deleted in the amino acid sequence SEQ ID NO: 150. In some embodiments, substitutions, insertions, or deletions occur in regions outside the CDRs (e.g., in the FRs). Optionally, the antibody or antigen-binding fragment thereof comprises the VH sequence SEQ ID NO: 150, including one or more post-translational modifications of that sequence. In a particular embodiment, the VH comprises one, two or three CDRs selected from: a. CDR-H1, comprising the amino acid sequence SEQ ID NO: 692, b. CDR-H2, comprising the amino acid sequence SEQ ID NO: 1234, and c. CDR-H3, comprising the amino acid sequence SEQ ID NO: 1776.

[2034] In one aspect, an antibody or antigen-binding fragment thereof is provided, wherein the antibody or antigen-binding fragment thereof comprises a light chain variable domain (VL) having at least 90%, 91%, 92%, 93%, 94%, 95%, 96%, 97%, 98%, 99%, or 100% sequence identity to the amino acid sequence SEQ ID NO: 421. In some embodiments, a VL sequence having at least 90%, 91%, 92%, 93%, 94%, 95%, 96%, 97%, 98%, or 99% identity contains substitutions (e.g., conservative substitutions), insertions, or deletions relative to the reference sequence, but an antibody or antigen-binding fragment thereof comprising that sequence retains the ability to bind to same antigen as the parent (e.g., cancer associated antigen). In some embodiments, a total of 1 to 10 amino acids have been substituted, inserted and/or deleted in the amino acid sequence SEQ ID NO: 421. In some embodiments, the substitutions, insertions, or deletions occur in regions outside the CDRs (e.g., in the FRs). Optionally, the antibody or antigen-binding fragment thereof comprises the VL sequence SEQ ID NO: 421, including one or more post-translational modifications of that sequence. In a particular embodiment, the VL comprises one, two or three CDRs selected from: a. CDR-L1, comprising the amino acid sequence SEQ ID NO: 963, b. CDR-L2, comprising the amino acid sequence SEQ ID NO: 1505, and c. CDR-L3, comprising the amino acid sequence SEQ ID NO: 2047.

[2035] In one aspect, an antibody or antigen-binding fragment thereof is provided, wherein the antibody or antigen-binding fragment thereof comprises a VH as in any of the embodiments provided above, and a VL as in any of the embodiments provided above. In some embodiments, the antibody or antigen-binding fragment thereof comprises the VH amino acid sequence of SEQ ID NO: 150, and the VL amino acid sequence of SEQ ID NO: 421, optionally including post-translational modifications of those sequences.

### TLUA1011

[2036] In one aspect, the present disclosure provides an antibody or antigen-binding fragment thereof comprising at least one or both variable regions selected from: a. VH comprising the amino acid sequence of SEQ ID NO: 151 and b. VL comprising the amino acid sequence of SEQ ID NO: 422.

[2037] In one aspect, the present disclosure provides an antibody or antigen-binding fragment thereof comprising at least one, two, three, four, five, or six CDRs selected from: a. CDR-H1 comprising the amino acid sequence of SEQ ID NO: 693, b. CDR-H2 comprising the amino acid sequence of SEQ ID NO: 1235, c. CDR-H3 comprising the amino acid sequence of SEQ ID NO: 1777, d. CDR-L1 comprising the amino acid sequence of SEQ ID NO: 964, e. CDR-L2 comprising the amino acid sequence of SEQ ID NO: 1506, and f. CDR-L3 comprising the amino acid sequence of SEQ ID NO: 2048.

[2038] In one aspect, the present disclosure provides an antibody or antigen-binding fragment thereof comprising a CDR-H3 comprising the amino acid sequence of SEQ ID NO: 1777, and a CDR-L3 comprising the amino acid sequence of SEQ ID NO: 2048.

[2039] In one aspect, the present disclosure provides an antibody or antigen-binding fragment thereof comprising at least one, at least two, or all three VH CDR sequences selected from: a. CDR-H1 comprising the amino acid sequence of SEQ ID NO: 693, b. CDR-H2 comprising the amino acid sequence of SEQ ID NO: 1235, c. CDR-H3 comprising the amino acid sequence of SEQ ID NO: 1777, and a VL comprising the amino acid sequence of SEQ ID NO: 422.

[2040] In one aspect, the present disclosure provides an antibody or antigen-binding fragment thereof comprising at least one, at least two, or all three VL CDR sequences selected from: a. CDR-L1 comprising the amino acid sequence of SEQ ID NO: 964, b. CDR-L2 comprising the amino acid sequence of SEQ ID NO: 1506, c. CDR-L3 comprising the amino acid sequence of SEQ ID NO: 2048, and d. VH comprising the amino acid sequence of SEQ ID NO: 151.

[2041] In one aspect, an antibody or antigen-binding fragment thereof is provided, wherein the antibody or antigen-binding fragment thereof comprises a heavy chain variable domain (VH) having at least 90%, 91%, 92%, 93%, 94%, 95%, 96%, 97%, 98%, 99%, or 100% sequence identity to the amino acid sequence SEQ ID NO: 151. In some embodiments, a VH sequence having at least 90%, 91%, 92%, 93%, 94%, 95%, 96%, 97%, 98%, or 99% identity contains substitutions (e.g., conservative substitutions), insertions, or deletions relative to the reference sequence, but an antibody or antigen-binding fragment thereof comprising that sequence retains the ability to bind to same antigen as of the parent (e.g., cancer associated antigen). In some embodiments, a total of 1 to 10 amino acids have been substituted, inserted and/or deleted in the amino acid sequence SEQ ID NO: 151. In some embodiments, substitutions, insertions, or deletions occur in regions outside the CDRs (e.g., in the FRs). Optionally, the antibody or antigen-binding fragment thereof comprises the VH sequence SEQ ID NO: 151, including one or more post-translational modifications of that sequence. In a particular embodiment, the VH comprises one, two or three CDRs selected from: a. CDR-H1, comprising the amino acid sequence SEQ ID NO: 693, b. CDR-H2, comprising the amino acid sequence SEQ ID NO: 1235, and a. CDR-H3, comprising the amino acid sequence SEQ ID NO: 1777.

[2042] In one aspect, an antibody or antigen-binding fragment thereof is provided, wherein the antibody or antigen-binding fragment thereof comprises a light chain variable domain (VL) having at least 90%, 91%, 92%, 93%, 94%, 95%, 96%, 97%, 98%, 99%, or 100% sequence identity to the amino acid sequence SEQ ID NO: 422. In some embodiments, a VL sequence having at least 90%, 91%, 92%, 93%, 94%, 95%, 96%, 97%, 98%, or 99% identity contains substitutions (e.g., conservative substitutions), insertions, or deletions relative to the reference sequence, but an antibody or antigen-binding fragment thereof comprising that sequence retains the ability to bind to same antigen as the parent (e.g., cancer associated antigen). In some embodiments, a total of 1 to 10 amino acids have been substituted, inserted and/or deleted in the amino acid sequence SEQ ID NO: 422. In some embodiments, the substitutions, insertions, or deletions occur in regions outside the CDRs (e.g., in the FRs). Optionally, the antibody or antigen-binding fragment thereof comprises the VL sequence SEQ ID NO: 422, including one or more post-translational modifications of that sequence. In a particular embodiment, the VL comprises one, two or three CDRs selected from: a. CDR-L1, comprising the amino acid sequence SEQ ID NO: 964, b. CDR-L2, comprising the amino acid sequence SEQ ID NO: 1506, and c. CDR-L3, comprising the amino acid sequence SEQ ID NO: 2048.

[2043] In one aspect, an antibody or antigen-binding fragment thereof is provided, wherein the antibody or antigen-binding fragment thereof comprises a VH as in any of the embodiments provided above, and a VL as in any of the embodiments provided above. In some embodiments, the antibody or antigen-binding fragment thereof comprises the VH amino acid sequence of SEQ ID NO: 151, and the VL amino acid sequence of SEQ ID NO: 422, optionally including post-translational modifications of those sequences.

### TLUA1012

[2044] In one aspect, the present disclosure provides an antibody or antigen-binding fragment thereof comprising at least one or both variable regions selected from: a. VH comprising the amino acid sequence of SEQ ID NO: 152 and a VL comprising the amino acid sequence of SEQ ID NO: 423.

[2045] In one aspect, the present disclosure provides an antibody or antigen-binding fragment thereof comprising at least one, two, three, four, five, or six CDRs selected from: a. CDR-H1 comprising the amino acid sequence of SEQ ID NO: 694, b. CDR-H2 comprising the amino acid sequence of SEQ ID NO: 1236, c. CDR-H3 comprising the amino acid sequence of SEQ ID NO: 1778, d. CDR-L1 comprising the amino acid sequence of SEQ ID NO: 965, e. CDR-L2 comprising the amino acid sequence of SEQ ID NO: 1507, and f. CDR-L3 comprising the amino acid sequence of SEQ ID NO: 2049.

[2046] In one aspect, the present disclosure provides an antibody or antigen-binding fragment thereof comprising a CDR-H3 comprising the amino acid sequence of SEQ ID NO: 1778, and a CDR-L3 comprising the amino acid sequence of SEQ ID NO: 2049.

[2047] In one aspect, the present disclosure provides an antibody or antigen-binding fragment thereof comprising at least one, at least two, or all three VH CDR sequences selected from: a. CDR-H1 comprising the amino acid sequence of SEQ ID NO: 694, b. CDR-H2 comprising the amino acid sequence of SEQ ID NO: 1236, c. CDR-H3 comprising the amino acid sequence of SEQ ID NO: 1778, and a VL comprising the amino acid sequence of SEQ ID NO: 423.

[2048] In one aspect, the present disclosure provides an antibody or antigen-binding fragment thereof comprising at least one, at least two, or all three VL CDR sequences selected from: a. CDR-L1 comprising the amino acid sequence of SEQ ID NO: 965, b. CDR-L2 comprising the amino acid sequence of SEQ ID NO: 1507, c. CDR-L3 comprising the amino acid sequence of SEQ ID NO: 2049, and a VH comprising the amino acid sequence of SEQ ID NO: 152.

[2049] In one aspect, an antibody or antigen-binding fragment thereof is provided, wherein the antibody or antigen-binding fragment thereof comprises a heavy chain variable domain (VH) having at least 90%, 91%, 92%, 93%, 94%, 95%, 96%, 97%, 98%, 99%, or 100% sequence identity to the amino acid sequence SEQ ID NO: 152. In some embodiments, a VH sequence having at least 90%, 91%, 92%, 93%, 94%, 95%, 96%, 97%, 98%, or 99% identity contains substitutions (e.g., conservative substitutions), insertions, or deletions relative to the reference sequence, but an antibody or antigen-binding fragment thereof comprising that sequence retains the ability to bind to same antigen as of the parent (e.g., cancer associated antigen). In some embodiments, a total of 1 to 10 amino acids have been substituted, inserted and/or deleted in the amino acid sequence SEQ ID NO: 152. In some embodiments, substitutions, insertions, or deletions occur in regions outside the CDRs (e.g., in the FRs). Optionally, the antibody or antigen-binding fragment thereof comprises the VH sequence SEQ ID NO: 152, including one or more post-translational modifications of that sequence. In a particular embodiment, the VH comprises one, two or three CDRs selected from: a. CDR-H1, comprising the amino acid sequence SEQ ID NO: 694, b. CDR-H2, comprising the amino acid sequence SEQ ID NO: 1236, and c. CDR-H3, comprising the amino acid sequence SEQ ID NO: 1778.

[2050] In one aspect, an antibody or antigen-binding fragment thereof is provided, wherein the antibody or antigen-binding fragment thereof comprises a light chain variable domain (VL) having at least 90%, 91%, 92%, 93%, 94%, 95%, 96%, 97%, 98%, 99%, or 100% sequence identity to the amino acid sequence SEQ ID NO: 423. In some embodiments, a VL sequence having at least 90%, 91%, 92%, 93%, 94%, 95%, 96%, 97%, 98%, or 99% identity contains substitutions (e.g., conservative substitutions), insertions, or deletions relative to the reference sequence, but an antibody or antigen-binding fragment thereof comprising that sequence retains the ability to bind to same antigen as the parent (e.g., cancer associated antigen). In some embodiments, a total of 1 to 10 amino acids have been substituted, inserted and/or deleted in the amino acid sequence SEQ ID NO: 423. In some embodiments, the substitutions, insertions, or deletions occur in regions outside the CDRs (e.g., in the FRs). Optionally, the antibody or antigen-binding fragment thereof comprises the VL sequence SEQ ID NO: 423, including one or more post-translational modifications of that sequence. In a particular embodiment, the VL comprises one, two or three CDRs selected from: a. CDR-L1, comprising the amino acid sequence SEQ ID NO: 965, b. CDR-L2, comprising the amino acid sequence SEQ ID NO: 1507, and c. CDR-L3, comprising the amino acid sequence SEQ ID NO: 2049.

[2051] In one aspect, an antibody or antigen-binding fragment thereof is provided, wherein the antibody or antigen-binding fragment thereof comprises a VH as in any of the embodiments provided above, and a VL as in any of the embodiments provided above. In some embodiments, the antibody or antigen-binding fragment thereof comprises the VH amino acid sequence of SEQ ID NO: 152, and the VL amino acid sequence of SEQ ID NO: 423, optionally including post-translational modifications of those sequences.

### TLUA1013

[2052] In one aspect, the present disclosure provides an antibody or antigen-binding fragment thereof comprising at least one or both variable regions selected from: a. VH comprising the amino acid sequence of SEQ ID NO: 153 and b. VL comprising the amino acid sequence of SEQ ID NO: 424.

[2053] In one aspect, the present disclosure provides an antibody or antigen-binding fragment thereof comprising at least one, two, three, four, five, or six CDRs selected from: a. CDR-H1 comprising the amino acid sequence of SEQ ID NO: 695, b. CDR-H2 comprising the amino acid sequence of SEQ ID NO: 1237, c. CDR-H3 comprising the amino acid sequence of SEQ ID NO: 1779, d. CDR-L1 comprising the amino acid sequence of SEQ ID NO: 966, e. CDR-L2 comprising the amino acid sequence of SEQ ID NO: 1508, and f. CDR-L3 comprising the amino acid sequence of SEQ ID NO: 2050.

[2054] In one aspect, the present disclosure provides an antibody or antigen-binding fragment thereof comprising a CDR-H3 comprising the amino acid sequence of SEQ ID NO: 1779, and a CDR-L3 comprising the amino acid sequence of SEQ ID NO: 2050.

[2055] In one aspect, the present disclosure provides an antibody or antigen-binding fragment thereof comprising at least one, at least two, or all three VH CDR sequences selected from: a. CDR-H1 comprising the amino acid sequence of SEQ ID NO: 695, b. CDR-H2 comprising the amino acid sequence of SEQ ID NO: 1237, c. CDR-H3 comprising the amino acid sequence of SEQ ID NO: 1779, and a VL comprising the amino acid sequence of SEQ ID NO: 424.

[2056] In one aspect, the present disclosure provides an antibody or antigen-binding fragment thereof comprising at least one, at least two, or all three VL CDR sequences selected from: a. CDR-L1 comprising the amino acid sequence of SEQ ID NO: 966, b. CDR-L2 comprising the amino acid sequence of SEQ ID NO: 1508, c. CDR-L3 comprising the amino acid sequence of SEQ ID NO: 2050, and a VH comprising the amino acid sequence of SEQ ID NO: 153.

[2057] In one aspect, an antibody or antigen-binding fragment thereof is provided, wherein the antibody or antigen-binding fragment thereof comprises a heavy chain variable domain (VH) having at least 90%, 91%, 92%, 93%, 94%, 95%, 96%, 97%, 98%, 99%, or 100% sequence identity to the amino acid sequence SEQ ID NO: 153. In some embodiments, a VH sequence having at least 90%, 91%, 92%, 93%, 94%, 95%, 96%, 97%, 98%, or 99% identity contains substitutions (e.g., conservative substitutions), insertions, or deletions relative to the reference sequence, but an antibody or antigen-binding fragment thereof comprising that sequence retains the ability to bind to same antigen as of the parent (e.g., cancer associated antigen). In some embodiments, a total of 1 to 10 amino acids have been substituted, inserted and/or deleted in the amino acid sequence SEQ ID NO: 153. In some embodiments, substitutions, insertions, or deletions occur in regions outside the CDRs (e.g., in the FRs). Optionally, the antibody or antigen-binding fragment thereof comprises the VH sequence SEQ ID NO: 153, including one or more post-translational modifications of that sequence. In a particular embodiment, the VH comprises one, two or three CDRs selected from: a. CDR-H1, comprising the amino acid sequence SEQ ID NO: 695, b. CDR-H2, comprising the amino acid sequence SEQ ID NO: 1237, and c. CDR-H3, comprising the amino acid sequence SEQ ID NO: 1779.

[2058] In one aspect, an antibody or antigen-binding fragment thereof is provided, wherein the antibody or antigen-binding fragment thereof comprises a light chain variable domain (VL) having at least 90%, 91%, 92%, 93%, 94%, 95%, 96%, 97%, 98%, 99%, or 100% sequence identity to the amino acid sequence SEQ ID NO: 424. In some embodiments, a VL sequence having at least 90%, 91%, 92%, 93%, 94%, 95%, 96%, 97%, 98%, or 99% identity contains substitutions (e.g., conservative substitutions), insertions, or deletions relative to the reference sequence, but an antibody or antigen-binding fragment thereof comprising that sequence retains the ability to bind to same antigen as the parent (e.g., cancer associated antigen). In some embodiments, a total of 1 to 10 amino acids have been substituted, inserted and/or deleted in the amino acid sequence SEQ ID NO: 424. In some embodiments, the substitutions, insertions, or deletions occur in regions outside the CDRs (e.g., in the FRs). Optionally, the antibody or antigen-binding fragment thereof comprises the VL sequence SEQ ID NO: 424, including one or more post-translational modifications of that sequence. In a particular embodiment, the VL comprises one, two or three CDRs selected from: a. CDR-L1, comprising the amino acid sequence SEQ ID NO: 966, b. CDR-L2, comprising the amino acid sequence SEQ ID NO: 1508, and c. CDR-L3, comprising the amino acid sequence SEQ ID NO: 2050.

[2059] In one aspect, an antibody or antigen-binding fragment thereof is provided, wherein the antibody or antigen-binding fragment thereof comprises a VH as in any of the embodiments provided above, and a VL as in any of the embodiments provided above. In some embodiments, the antibody or antigen-binding fragment thereof comprises the VH amino acid sequence of SEQ ID NO: 153, and the VL amino acid sequence of SEQ ID NO: 424, optionally including post-translational modifications of those sequences.

### TLUA1014

[2060] In one aspect, the present disclosure provides an antibody or antigen-binding fragment thereof comprising at least one or both variable regions selected from: a. VH comprising the amino acid sequence of SEQ ID NO: 154 and b. VL comprising the amino acid sequence of SEQ ID NO: 425.

[2061] In one aspect, the present disclosure provides an antibody or antigen-binding fragment thereof comprising at least one, two, three, four, five, or six CDRs selected from: a. CDR-H1 comprising the amino acid sequence of SEQ ID NO: 696, b. CDR-H2 comprising the amino acid sequence of SEQ ID NO: 1238, c. CDR-H3 comprising the amino acid sequence of SEQ ID NO: 1780, d. CDR-L1 comprising the amino acid sequence of SEQ ID NO: 967, e. CDR-L2 comprising the amino acid sequence of SEQ ID NO: 1509, and f. CDR-L3 comprising the amino acid sequence of SEQ ID NO: 2051.

[2062] In one aspect, the present disclosure provides an antibody or antigen-binding fragment thereof comprising a CDR-H3 comprising the amino acid sequence of SEQ ID NO: 1780, and a CDR-L3 comprising the amino acid sequence of SEQ ID NO: 2051.

[2063] In one aspect, the present disclosure provides an antibody or antigen-binding fragment thereof comprising at least one, at least two, or all three VH CDR sequences selected from: a. CDR-H1 comprising the amino acid sequence of SEQ ID NO: 696, b. CDR-H2 comprising the amino acid sequence of SEQ ID NO: 1238, c. CDR-H3 comprising the amino acid sequence of SEQ ID NO: 1780, and a VL comprising the amino acid sequence of SEQ ID NO: 425.

[2064] In one aspect, the present disclosure provides an antibody or antigen-binding fragment thereof comprising at least one, at least two, or all three VL CDR sequences selected from: a. CDR-L1 comprising the amino acid sequence of SEQ ID NO: 967, b. CDR-L2 comprising the amino acid sequence of SEQ ID NO: 1509, c. CDR-L3 comprising the amino acid sequence of SEQ ID NO: 2051, and a VH comprising the amino acid sequence of SEQ ID NO: 154.

[2065] In one aspect, an antibody or antigen-binding fragment thereof is provided, wherein the antibody or antigen-binding fragment thereof comprises a heavy chain variable domain (VH) having at least 90%, 91%, 92%, 93%, 94%, 95%, 96%, 97%, 98%, 99%, or 100% sequence identity to the amino acid sequence SEQ ID NO: 154. In some embodiments, a VH sequence having at least 90%, 91%, 92%, 93%, 94%, 95%, 96%, 97%, 98%, or 99% identity contains substitutions (e.g., conservative substitutions), insertions, or deletions relative to the reference sequence, but an antibody or antigen-binding fragment thereof comprising that sequence retains the ability to bind to same antigen as of the parent (e.g., cancer associated antigen). In some embodiments, a total of 1 to 10 amino acids have been substituted, inserted and/or deleted in the amino acid sequence SEQ ID NO: 154. In some embodiments, substitutions, insertions, or deletions occur in regions outside the CDRs (e.g., in the FRs). Optionally, the antibody or antigen-binding fragment thereof comprises the VH sequence SEQ ID NO: 154, including one or more post-translational modifications of that sequence. In a particular embodiment, the VH comprises one, two or three CDRs selected from: a. CDR-H1, comprising the amino acid sequence SEQ ID NO: 696, b. CDR-H2, comprising the amino acid sequence SEQ ID NO: 1238, and c. CDR-H3, comprising the amino acid sequence SEQ ID NO: 1780.

[2066] In one aspect, an antibody or antigen-binding fragment thereof is provided, wherein the antibody or antigen-binding fragment thereof comprises a light chain variable domain (VL) having at least 90%, 91%, 92%, 93%, 94%, 95%, 96%, 97%, 98%, 99%, or 100% sequence identity to the amino acid sequence SEQ ID NO: 425. In some embodiments, a VL sequence having at least 90%, 91%, 92%, 93%, 94%, 95%, 96%, 97%, 98%, or 99% identity contains substitutions (e.g., conservative substitutions), insertions, or deletions relative to the reference sequence, but an antibody or antigen-binding fragment thereof comprising that sequence retains the ability to bind to same antigen as the parent (e.g., cancer associated antigen). In some embodiments, a total of 1 to 10 amino acids have been substituted, inserted and/or deleted in the amino acid sequence SEQ ID NO: 425. In some embodiments, the substitutions, insertions, or deletions occur in regions outside the CDRs (e.g., in the FRs). Optionally, the antibody or antigen-binding fragment thereof comprises the VL sequence SEQ ID NO: 425, including one or more post-translational modifications of that sequence. In a particular embodiment, the VL comprises one, two or three CDRs selected from: a. CDR-L1, comprising the amino acid sequence SEQ ID NO: 967, b. CDR-L2, comprising the amino acid sequence SEQ ID NO: 1509, and c. CDR-L3, comprising the amino acid sequence SEQ ID NO: 2051.

[2067] In one aspect, an antibody or antigen-binding fragment thereof is provided, wherein the antibody or antigen-binding fragment thereof comprises a VH as in any of the embodiments provided above, and a VL as in any of the embodiments provided above. In some embodiments, the antibody or antigen-binding fragment thereof comprises the VH amino acid sequence of SEQ ID NO: 154, and the VL amino acid sequence of SEQ ID NO: 425, optionally including post-translational modifications of those sequences.

### TLUA1015

[2068] In one aspect, the present disclosure provides an antibody or antigen-binding fragment thereof comprising at least one or both variable regions selected from: a. VH comprising the amino acid sequence of SEQ ID NO: 155 and b. VL comprising the amino acid sequence of SEQ ID NO: 426.

[2069] In one aspect, the present disclosure provides an antibody or antigen-binding fragment thereof comprising at least one, two, three, four, five, or six CDRs selected from: a. CDR-H1 comprising the amino acid sequence of SEQ ID NO: 697, b. CDR-H2 comprising the amino acid sequence of SEQ ID NO: 1239, c. CDR-H3 comprising the amino acid sequence of SEQ ID NO: 1781, d. CDR-L1 comprising the amino acid sequence of SEQ ID NO: 968, e. CDR-L2 comprising the amino acid sequence of SEQ ID NO: 1510, and f. CDR-L3 comprising the amino acid sequence of SEQ ID NO: 2052.

[2070] In one aspect, the present disclosure provides an antibody or antigen-binding fragment thereof comprising a CDR-H3 comprising the amino acid sequence of SEQ ID NO: 1781, and a CDR-L3 comprising the amino acid sequence of SEQ ID NO: 2052.

[2071] In one aspect, the present disclosure provides an antibody or antigen-binding fragment thereof comprising at least one, at least two, or all three VH CDR sequences selected from: a. CDR-H1 comprising the amino acid sequence of SEQ ID NO: 697, b. CDR-H2 comprising the amino acid sequence of SEQ ID NO: 1239, c. CDR-H3 comprising the amino acid sequence of SEQ ID NO: 1781, and a VL comprising the amino acid sequence of SEQ ID NO: 426.

[2072] In one aspect, the present disclosure provides an antibody or antigen-binding fragment thereof comprising at least one, at least two, or all three VL CDR sequences selected from: a. CDR-L1 comprising the amino acid sequence of SEQ ID NO: 968, b. CDR-L2 comprising the amino acid sequence of SEQ ID NO: 1510, c. CDR-L3 comprising the amino acid sequence of SEQ ID NO: 2052, and a VH comprising the amino acid sequence of SEQ ID NO: 155.

[2073] In one aspect, an antibody or antigen-binding fragment thereof is provided, wherein the antibody or antigen-binding fragment thereof comprises a heavy chain variable domain (VH) having at least 90%, 91%, 92%, 93%, 94%, 95%, 96%, 97%, 98%, 99%, or 100% sequence identity to the amino acid sequence SEQ ID NO: 155. In some embodiments, a VH sequence having at least 90%, 91%, 92%, 93%, 94%, 95%, 96%, 97%, 98%, or 99% identity contains substitutions (e.g., conservative substitutions), insertions, or deletions relative to the reference sequence, but an antibody or antigen-binding fragment thereof comprising that sequence retains the ability to bind to same antigen as of the parent (e.g., cancer associated antigen). In some embodiments, a total of 1 to 10 amino acids have been substituted, inserted and/or deleted in the amino acid sequence SEQ ID NO: 155. In some embodiments, substitutions, insertions, or deletions occur in regions outside the CDRs (e.g., in the FRs). Optionally, the antibody or antigen-binding fragment thereof comprises the VH sequence SEQ ID NO: 155, including one or more post-translational modifications of that sequence. In a particular embodiment, the VH comprises one, two or three CDRs selected from: a. CDR-H1, comprising the amino acid sequence SEQ ID NO: 697, b. CDR-H2, comprising the amino acid sequence SEQ ID NO: 1239, and c. CDR-H3, comprising the amino acid sequence SEQ ID NO: 1781.

[2074] In one aspect, an antibody or antigen-binding fragment thereof is provided, wherein the antibody or antigen-binding fragment thereof comprises a light chain variable domain (VL) having at least 90%, 91%, 92%, 93%, 94%, 95%, 96%, 97%, 98%, 99%, or 100% sequence identity to the amino acid sequence SEQ ID NO: 426. In some embodiments, a VL sequence having at least 90%, 91%, 92%, 93%, 94%, 95%, 96%, 97%, 98%, or 99% identity contains substitutions (e.g., conservative substitutions), insertions, or deletions relative to the reference sequence, but an antibody or antigen-binding fragment thereof comprising that sequence retains the ability to bind to same antigen as the parent (e.g., cancer associated antigen). In some embodiments, a total of 1 to 10 amino acids have been substituted, inserted and/or deleted in the amino acid sequence SEQ ID NO: 426. In some embodiments, the substitutions, insertions, or deletions occur in regions outside the CDRs (e.g., in the FRs). Optionally, the antibody or antigen-binding fragment thereof comprises the VL sequence SEQ ID NO: 426, including one or more post-translational modifications of that sequence. In a particular embodiment, the VL comprises one, two or three CDRs selected from: a. CDR-L1, comprising the amino acid sequence SEQ ID NO: 968, b. CDR-L2, comprising the amino acid sequence SEQ ID NO: 1510, and c. CDR-L3, comprising the amino acid sequence SEQ ID NO: 2052.

[2075] In one aspect, an antibody or antigen-binding fragment thereof is provided, wherein the antibody or antigen-binding fragment thereof comprises a VH as in any of the embodiments provided above, and a VL as in any of the embodiments provided above. In some embodiments, the antibody or antigen-binding fragment thereof comprises the VH amino acid sequence of SEQ ID NO: 155, and the VL amino acid sequence of SEQ ID NO: 426, optionally including post-translational modifications of those sequences.

### TLUA1016

[2076] In one aspect, the present disclosure provides an antibody or antigen-binding fragment thereof comprising at least one or both variable regions selected from: a. VH comprising the amino acid sequence of SEQ ID NO: 156 and b. VL comprising the amino acid sequence of SEQ ID NO: 427.

[2077] In one aspect, the present disclosure provides an antibody or antigen-binding fragment thereof comprising at least one, two, three, four, five, or six CDRs selected from: a. CDR-H1 comprising the amino acid sequence of SEQ ID NO: 698, b. CDR-H2 comprising the amino acid sequence of SEQ ID NO: 1240, c. CDR-H3 comprising the amino acid sequence of SEQ ID NO: 1782, d. CDR-L1 comprising the amino acid sequence of SEQ ID NO: 969, e. CDR-L2 comprising the amino acid sequence of SEQ ID NO: 1511, and f. CDR-L3 comprising the amino acid sequence of SEQ ID NO: 2053.

[2078] In one aspect, the present disclosure provides an antibody or antigen-binding fragment thereof comprising a CDR-H3 comprising the amino acid sequence of SEQ ID NO: 1782, and a CDR-L3 comprising the amino acid sequence of SEQ ID NO: 2053.

[2079] In one aspect, the present disclosure provides an antibody or antigen-binding fragment thereof comprising at least one, at least two, or all three VH CDR sequences selected from: a CDR-H1 comprising the amino acid sequence of SEQ ID NO: 698, b. CDR-H2 comprising the amino acid sequence of SEQ ID NO: 1240, c. CDR-H3 comprising the amino acid sequence of SEQ ID NO: 1782, and a VL comprising the amino acid sequence of SEQ ID NO: 427.

[2080] In one aspect, the present disclosure provides an antibody or antigen-binding fragment thereof comprising at least one, at least two, or all three VL CDR sequences selected from: a. CDR-L1 comprising the amino acid sequence of SEQ ID NO: 969, b. CDR-L2 comprising the amino acid sequence of SEQ ID NO: 1511, c. CDR-L3 comprising the amino acid sequence of SEQ ID NO: 2053, and a VH comprising the amino acid sequence of SEQ ID NO: 156.

[2081] In one aspect, an antibody or antigen-binding fragment thereof is provided, wherein the antibody or antigen-binding fragment thereof comprises a heavy chain variable domain (VH) having at least 90%, 91%, 92%, 93%, 94%, 95%, 96%, 97%, 98%, 99%, or 100% sequence identity to the amino acid sequence SEQ ID NO: 156. In some embodiments, a VH sequence having at least 90%, 91%, 92%, 93%, 94%, 95%, 96%, 97%, 98%, or 99% identity contains substitutions (e.g., conservative substitutions), insertions, or deletions relative to the reference sequence, but an antibody or antigen-binding fragment thereof comprising that sequence retains the ability to bind to same antigen as of the parent (e.g., cancer associated antigen). In some embodiments, a total of 1 to 10 amino acids have been substituted, inserted and/or deleted in the amino acid sequence SEQ ID NO: 156. In some embodiments, substitutions, insertions, or deletions occur in regions outside the CDRs (e.g., in the FRs). Optionally, the antibody or antigen-binding fragment thereof comprises the VH sequence SEQ ID NO: 156, including one or more post-translational modifications of that sequence. In a particular embodiment, the VH comprises one, two or three CDRs selected from: a. CDR-H1, comprising the amino acid sequence SEQ ID NO: 698, b. CDR-H2, comprising the amino acid sequence SEQ ID NO: 1240, and c. CDR-H3, comprising the amino acid sequence SEQ ID NO: 1782.

[2082] In one aspect, an antibody or antigen-binding fragment thereof is provided, wherein the antibody or antigen-binding fragment thereof comprises a light chain variable domain (VL) having at least 90%, 91%, 92%, 93%, 94%, 95%, 96%, 97%, 98%, 99%, or 100% sequence identity to the amino acid sequence SEQ ID NO: 427. In some embodiments, a VL sequence having at least 90%, 91%, 92%, 93%, 94%, 95%, 96%, 97%, 98%, or 99% identity contains substitutions (e.g., conservative substitutions), insertions, or deletions relative to the reference sequence, but an antibody or antigen-binding fragment thereof comprising that sequence retains the ability to bind to same antigen as the parent (e.g., cancer associated antigen). In some embodiments, a total of 1 to 10 amino acids have been substituted, inserted and/or deleted in the amino acid sequence SEQ ID NO: 427. In some embodiments, the substitutions, insertions, or deletions occur in regions outside the CDRs (e.g., in the FRs). Optionally, the antibody or antigen-binding fragment thereof comprises the VL sequence SEQ ID NO: 427, including one or more post-translational modifications of that sequence. In a particular embodiment, the VL comprises one, two or three CDRs selected from: a. CDR-L1, comprising the amino acid sequence SEQ ID NO: 969, b. CDR-L2, comprising the amino acid sequence SEQ ID NO: 1511, and c. CDR-L3, comprising the amino acid sequence SEQ ID NO: 2053.

[2083] In one aspect, an antibody or antigen-binding fragment thereof is provided, wherein the antibody or antigen-binding fragment thereof comprises a VH as in any of the embodiments provided above, and a VL as in any of the embodiments provided above. In some embodiments, the antibody or antigen-binding fragment thereof comprises the VH amino acid sequence of SEQ ID NO: 156, and the VL amino acid sequence of SEQ ID NO: 427, optionally including post-translational modifications of those sequences.

### TLUA1017

[2084] In one aspect, the present disclosure provides an antibody or antigen-binding fragment thereof comprising at least one or both variable regions selected from: a. VH comprising the amino acid sequence of SEQ ID NO: 157 and b. VL comprising the amino acid sequence of SEQ ID NO: 428.

[2085] In one aspect, the present disclosure provides an antibody or antigen-binding fragment thereof comprising at least one, two, three, four, five, or six CDRs selected from: a. CDR-H1 comprising the amino acid sequence of SEQ ID NO: 699, b. CDR-H2 comprising the amino acid sequence of SEQ ID NO: 1241, c. CDR-H3 comprising the amino acid sequence of SEQ ID NO: 1783, d. CDR-L1 comprising the amino acid sequence of SEQ ID NO: 970, e. CDR-L2 comprising the amino acid sequence of SEQ ID NO: 1512, and f. CDR-L3 comprising the amino acid sequence of SEQ ID NO: 2054.

[2086] In one aspect, the present disclosure provides an antibody or antigen-binding fragment thereof comprising a CDR-H3 comprising the amino acid sequence of SEQ ID NO: 1783, and a CDR-L3 comprising the amino acid sequence of SEQ ID NO: 2054.

[2087] In one aspect, the present disclosure provides an antibody or antigen-binding fragment thereof comprising at least one, at least two, or all three VH CDR sequences selected from: a. CDR-H1 comprising the amino acid sequence of SEQ ID NO: 699, b. CDR-H2 comprising the amino acid sequence of SEQ ID NO: 1241, c. CDR-H3 comprising the amino acid sequence of SEQ ID NO: 1783, and a VL comprising the amino acid sequence of SEQ ID NO: 428.

[2088] In one aspect, the present disclosure provides an antibody or antigen-binding fragment thereof comprising at least one, at least two, or all three VL CDR sequences selected from: a. CDR-L1 comprising the amino acid sequence of SEQ ID NO: 970, b. CDR-L2 comprising the amino acid sequence of SEQ ID NO: 1512, c. CDR-L3 comprising the amino acid sequence of SEQ ID NO: 2054, and a VH comprising the amino acid sequence of SEQ ID NO: 157.

[2089] In one aspect, an antibody or antigen-binding fragment thereof is provided, wherein the antibody or antigen-binding fragment thereof comprises a heavy chain variable domain (VH) having at least 90%, 91%, 92%, 93%, 94%, 95%, 96%, 97%, 98%, 99%, or 100% sequence identity to the amino acid sequence SEQ ID NO: 157. In some embodiments, a VH sequence having at least 90%, 91%, 92%, 93%, 94%, 95%, 96%, 97%, 98%, or 99% identity contains substitutions (e.g., conservative substitutions), insertions, or deletions relative to the reference sequence, but an antibody or antigen-binding fragment thereof comprising that sequence retains the ability to bind to same antigen as of the parent (e.g., cancer associated antigen). In some embodiments, a total of 1 to 10 amino acids have been substituted, inserted and/or deleted in the amino acid sequence SEQ ID NO: 157. In some embodiments, substitutions, insertions, or deletions occur in regions outside the CDRs (e.g., in the FRs). Optionally, the antibody or antigen-binding fragment thereof comprises the VH sequence SEQ ID NO: 157, including one or more post-translational modifications of that sequence. In a particular embodiment, the VH comprises one, two or three CDRs selected from: a. CDR-H1, comprising the amino acid sequence SEQ ID NO: 699, b. CDR-H2, comprising the amino acid sequence SEQ ID NO: 1241, and c. CDR-H3, comprising the amino acid sequence SEQ ID NO: 1783.

[2090] In one aspect, an antibody or antigen-binding fragment thereof is provided, wherein the antibody or antigen-binding fragment thereof comprises a light chain variable domain (VL) having at least 90%, 91%, 92%, 93%, 94%, 95%, 96%, 97%, 98%, 99%, or 100% sequence identity to the amino acid sequence SEQ ID NO: 428. In some embodiments, a VL sequence having at least 90%, 91%, 92%, 93%, 94%, 95%, 96%, 97%, 98%, or 99% identity contains substitutions (e.g., conservative substitutions), insertions, or deletions relative to the reference sequence, but an antibody or antigen-binding fragment thereof comprising that sequence retains the ability to bind to same antigen as the parent (e.g., cancer associated antigen). In some embodiments, a total of 1 to 10 amino acids have been substituted, inserted and/or deleted in the amino acid sequence SEQ ID NO: 428. In some embodiments, the substitutions, insertions, or deletions occur in regions outside the CDRs (e.g., in the FRs). Optionally, the antibody or antigen-binding fragment thereof comprises the VL sequence SEQ ID NO: 428, including one or more post-translational modifications of that sequence. In a particular embodiment, the VL comprises one, two or three CDRs selected from: a. CDR-L1, comprising the amino acid sequence SEQ ID NO: 970, b. CDR-L2, comprising the amino acid sequence SEQ ID NO: 1512, and c. CDR-L3, comprising the amino acid sequence SEQ ID NO: 2054.

[2091] In one aspect, an antibody or antigen-binding fragment thereof is provided, wherein the antibody or antigen-binding fragment thereof comprises a VH as in any of the embodiments provided above, and a VL as in any of the embodiments provided above. In some embodiments, the antibody or antigen-binding fragment thereof comprises the VH amino acid sequence of SEQ ID NO: 157, and the VL amino acid sequence of SEQ ID NO: 428, optionally including post-translational modifications of those sequences.

### TLUA1018

[2092] In one aspect, the present disclosure provides an antibody or antigen-binding fragment thereof comprising at least one or both variable regions selected from: a. VH comprising the amino acid sequence of SEQ ID NO: 158 and b. VL comprising the amino acid sequence of SEQ ID NO: 429.

[2093] In one aspect, the present disclosure provides an antibody or antigen-binding fragment thereof comprising at least one, two, three, four, five, or six CDRs selected from: a. CDR-H1 comprising the amino acid sequence of SEQ ID NO: 700, b. CDR-H2 comprising the amino acid sequence of SEQ ID NO: 1242, c. CDR-H3 comprising the amino acid sequence of SEQ ID NO: 1784, d. CDR-L1 comprising the amino acid sequence of SEQ ID NO: 971, e. CDR-L2 comprising the amino acid sequence of SEQ ID NO: 1513, and f. CDR-L3 comprising the amino acid sequence of SEQ ID NO: 2055.

[2094] In one aspect, the present disclosure provides an antibody or antigen-binding fragment thereof comprising a CDR-H3 comprising the amino acid sequence of SEQ ID NO: 1784, and a CDR-L3 comprising the amino acid sequence of SEQ ID NO: 2055.

[2095] In one aspect, the present disclosure provides an antibody or antigen-binding fragment thereof comprising at least one, at least two, or all three VH CDR sequences selected from: a. CDR-H1 comprising the amino acid sequence of SEQ ID NO: 700, b. CDR-H2 comprising the amino acid sequence of SEQ ID NO: 1242, c. CDR-H3 comprising the amino acid sequence of SEQ ID NO: 1784, and a VL comprising the amino acid sequence of SEQ ID NO: 429.

[2096] In one aspect, the present disclosure provides an antibody or antigen-binding fragment thereof comprising at least one, at least two, or all three VL CDR sequences selected from: a. CDR-L1 comprising the amino acid sequence of SEQ ID NO: 971, b. CDR-L2 comprising the amino acid sequence of SEQ ID NO: 1513, c. CDR-L3 comprising the amino acid sequence of SEQ ID NO: 2055, and a VH comprising the amino acid sequence of SEQ ID NO: 158.

[2097] In one aspect, an antibody or antigen-binding fragment thereof is provided, wherein the antibody or antigen-binding fragment thereof comprises a heavy chain variable domain (VH) having at least 90%, 91%, 92%, 93%, 94%, 95%, 96%, 97%, 98%, 99%, or 100% sequence identity to the amino acid sequence SEQ ID NO: 158. In some embodiments, a VH sequence having at least 90%, 91%, 92%, 93%, 94%, 95%, 96%, 97%, 98%, or 99% identity contains substitutions (e.g., conservative substitutions), insertions, or deletions relative to the reference sequence, but an antibody or antigen-binding fragment thereof comprising that sequence retains the ability to bind to same antigen as of the parent (e.g., cancer associated antigen). In some embodiments, a total of 1 to 10 amino acids have been substituted, inserted and/or deleted in the amino acid sequence SEQ ID NO: 158. In some embodiments, substitutions, insertions, or deletions occur in regions outside the CDRs (e.g., in the FRs). Optionally, the antibody or antigen-binding fragment thereof comprises the VH sequence SEQ ID NO: 158, including one or more post-translational modifications of that sequence. In a particular embodiment, the VH comprises one, two or three CDRs selected from: a. CDR-H1, comprising the amino acid sequence SEQ ID NO: 700, b. CDR-H2, comprising the amino acid sequence SEQ ID NO: 1242, and c. CDR-H3, comprising the amino acid sequence SEQ ID NO: 1784.

[2098] In one aspect, an antibody or antigen-binding fragment thereof is provided, wherein the antibody or antigen-binding fragment thereof comprises a light chain variable domain (VL) having at least 90%, 91%, 92%, 93%, 94%, 95%, 96%, 97%, 98%, 99%, or 100% sequence identity to the amino acid sequence SEQ ID NO: 429. In some embodiments, a VL sequence having at least 90%, 91%, 92%, 93%, 94%, 95%, 96%, 97%, 98%, or 99% identity contains substitutions (e.g., conservative substitutions), insertions, or deletions relative to the reference sequence, but an antibody or antigen-binding fragment thereof comprising that sequence retains the ability to bind to same antigen as the parent (e.g., cancer associated antigen). In some embodiments, a total of 1 to 10 amino acids have been substituted, inserted and/or deleted in the amino acid sequence SEQ ID NO: 429. In some embodiments, the substitutions, insertions, or deletions occur in regions outside the CDRs (e.g., in the FRs). Optionally, the antibody or antigen-binding fragment thereof comprises the VL sequence SEQ ID NO: 429, including one or more post-translational modifications of that sequence. In a particular embodiment, the VL comprises one, two or three CDRs selected from: a. CDR-L1, comprising the amino acid sequence SEQ ID NO: 971, b. CDR-L2, comprising the amino acid sequence SEQ ID NO: 1513, and c. CDR-L3, comprising the amino acid sequence SEQ ID NO: 2055.

[2099] In one aspect, an antibody or antigen-binding fragment thereof is provided, wherein the antibody or antigen-binding fragment thereof comprises a VH as in any of the embodiments provided above, and a VL as in any of the embodiments provided above. In some embodiments, the antibody or antigen-binding fragment thereof comprises the VH amino acid sequence of SEQ ID NO: 158, and the VL amino acid sequence of SEQ ID NO: 429, optionally including post-translational modifications of those sequences.

### TLUS1001

[2100] In one aspect, the present disclosure provides an antibody or antigen-binding fragment thereof comprising at least one or both variable regions selected from: a. VH comprising the amino acid sequence of SEQ ID NO: 159 and b. VL comprising the amino acid sequence of SEQ ID NO: 430.

[2101] In one aspect, the present disclosure provides an antibody or antigen-binding fragment thereof comprising at least one, two, three, four, five, or six CDRs selected from: a. CDR-H1 comprising the amino acid sequence of SEQ ID NO: 701, b. CDR-H2 comprising the amino acid sequence of SEQ ID NO: 1243, c. CDR-H3 comprising the amino acid sequence of SEQ ID NO: 1785, d. CDR-L1 comprising the amino acid sequence of SEQ ID NO: 972, e. CDR-L2 comprising the amino acid sequence of SEQ ID NO: 1514, and f. CDR-L3 comprising the amino acid sequence of SEQ ID NO: 2056.

[2102] In one aspect, the present disclosure provides an antibody or antigen-binding fragment thereof comprising a CDR-H3 comprising the amino acid sequence of SEQ ID NO: 1785, and a CDR-L3 comprising the amino acid sequence of SEQ ID NO: 2056.

[2103] In one aspect, the present disclosure provides an antibody or antigen-binding fragment thereof comprising at least one, at least two, or all three VH CDR sequences selected from: a. CDR-H1 comprising the amino acid sequence of SEQ ID NO: 701, b. CDR-H2 comprising the amino acid sequence of SEQ ID NO: 1243, c. CDR-H3 comprising the amino acid sequence of SEQ ID NO: 1785, and a VL comprising the amino acid sequence of SEQ ID NO: 430.

[2104] In one aspect, the present disclosure provides an antibody or antigen-binding fragment thereof comprising at least one, at least two, or all three VL CDR sequences selected from: a. CDR-L1 comprising the amino acid sequence of SEQ ID NO: 972, b. CDR-L2 comprising the amino acid sequence of SEQ ID NO: 1514, c. CDR-L3 comprising the amino acid sequence of SEQ ID NO: 2056, and a VH comprising the amino acid sequence of SEQ ID NO: 159.

[2105] In one aspect, an antibody or antigen-binding fragment thereof is provided, wherein the antibody or antigen-binding fragment thereof comprises a heavy chain variable domain (VH) having at least 90%, 91%, 92%, 93%, 94%, 95%, 96%, 97%, 98%, 99%, or 100% sequence identity to the amino acid sequence SEQ ID NO: 159. In some embodiments, a VH sequence having at least 90%, 91%, 92%, 93%, 94%, 95%, 96%, 97%, 98%, or 99% identity contains substitutions (e.g., conservative substitutions), insertions, or deletions relative to the reference sequence, but an antibody or antigen-binding fragment thereof comprising that sequence retains the ability to bind to same antigen as of the parent (e.g., cancer associated antigen). In some embodiments, a total of 1 to 10 amino acids have been substituted, inserted and/or deleted in the amino acid sequence SEQ ID NO: 159. In some embodiments, substitutions, insertions, or deletions occur in regions outside the CDRs (e.g., in the FRs). Optionally, the antibody or antigen-binding fragment thereof comprises the VH sequence SEQ ID NO: 159, including one or more post-translational modifications of that sequence. In a particular embodiment, the VH comprises one, two or three CDRs selected from: a. CDR-H1, comprising the amino acid sequence SEQ ID NO: 701, b. CDR-H2, comprising the amino acid sequence SEQ ID NO: 1243, and a CDR-H3, comprising the amino acid sequence SEQ ID NO: 1785.

[2106] In one aspect, an antibody or antigen-binding fragment thereof is provided, wherein the antibody or antigen-binding fragment thereof comprises a light chain variable domain (VL) having at least 90%, 91%, 92%, 93%, 94%, 95%, 96%, 97%, 98%, 99%, or 100% sequence identity to the amino acid sequence SEQ ID NO: 430. In some embodiments, a VL sequence having at least 90%, 91%, 92%, 93%, 94%, 95%, 96%, 97%, 98%, or 99% identity contains substitutions (e.g., conservative substitutions), insertions, or deletions relative to the reference sequence, but an antibody or antigen-binding fragment thereof comprising that sequence retains the ability to bind to same antigen as the parent (e.g., cancer associated antigen). In some embodiments, a total of 1 to 10 amino acids have been substituted, inserted and/or deleted in the amino acid sequence SEQ ID NO: 430. In some embodiments, the substitutions, insertions, or deletions occur in regions outside the CDRs (e.g., in the FRs). Optionally, the antibody or antigen-binding fragment thereof comprises the VL sequence SEQ ID NO: 430, including one or more post-translational modifications of that sequence. In a particular embodiment, the VL comprises one, two or three CDRs selected from: a. CDR-L1, comprising the amino acid sequence SEQ ID NO: 972, b. CDR-L2, comprising the amino acid sequence SEQ ID NO: 1514, and c. CDR-L3, comprising the amino acid sequence SEQ ID NO: 2056.

[2107] In one aspect, an antibody or antigen-binding fragment thereof is provided, wherein the antibody or antigen-binding fragment thereof comprises a VH as in any of the embodiments provided above, and a VL as in any of the embodiments provided above. In some embodiments, the antibody or antigen-binding fragment thereof comprises the VH amino acid sequence of SEQ ID NO: 159, and the VL amino acid sequence of SEQ ID NO: 430, optionally including post-translational modifications of those sequences.

### TLUS1002

[2108] In one aspect, the present disclosure provides an antibody or antigen-binding fragment thereof comprising at least one or both variable regions selected from: a VH comprising the amino acid sequence of SEQ ID NO: 160 and b. VL comprising the amino acid sequence of SEQ ID NO: 431.

[2109] In one aspect, the present disclosure provides an antibody or antigen-binding fragment thereof comprising at least one, two, three, four, five, or six CDRs selected from: a. CDR-H1 comprising the amino acid sequence of SEQ ID NO: 702, b. CDR-H2 comprising the amino acid sequence of SEQ ID NO: 1244, c. CDR-H3 comprising the amino acid sequence of SEQ ID NO: 1786, d. CDR-L1 comprising the amino acid sequence of SEQ ID NO: 973, e. CDR-L2 comprising the amino acid sequence of SEQ ID NO: 1515, and f. CDR-L3 comprising the amino acid sequence of SEQ ID NO: 2057.

[2110] In one aspect, the present disclosure provides an antibody or antigen-binding fragment thereof comprising a CDR-H3 comprising the amino acid sequence of SEQ ID NO: 1786, and a CDR-L3 comprising the amino acid sequence of SEQ ID NO: 2057.

[2111] In one aspect, the present disclosure provides an antibody or antigen-binding fragment thereof comprising at least one, at least two, or all three VH CDR sequences selected from: a. CDR-H1 comprising the amino acid sequence of SEQ ID NO: 702, b. CDR-H2 comprising the amino acid sequence of SEQ ID NO: 1244, c. CDR-H3 comprising the amino acid sequence of SEQ ID NO: 1786, and a VL comprising the amino acid sequence of SEQ ID NO: 431.

[2112] In one aspect, the present disclosure provides an antibody or antigen-binding fragment thereof comprising at least one, at least two, or all three VL CDR sequences selected from: a. CDR-L1 comprising the amino acid sequence of SEQ ID NO: 973, b. CDR-L2 comprising the amino acid sequence of SEQ ID NO: 1515, c. CDR-L3 comprising the amino acid sequence of SEQ ID NO: 2057, and a VH comprising the amino acid sequence of SEQ ID NO: 160.

[2113] In one aspect, an antibody or antigen-binding fragment thereof is provided, wherein the antibody or antigen-binding fragment thereof comprises a heavy chain variable domain (VH) having at least 90%, 91%, 92%, 93%, 94%, 95%, 96%, 97%, 98%, 99%, or 100% sequence identity to the amino acid sequence SEQ ID NO: 160. In some embodiments, a VH sequence having at least 90%, 91%, 92%, 93%, 94%, 95%, 96%, 97%, 98%, or 99% identity contains substitutions (e.g., conservative substitutions), insertions, or deletions relative to the reference sequence, but an antibody or antigen-binding fragment thereof comprising that sequence retains the ability to bind to same antigen as of the parent (e.g., cancer associated antigen). In some embodiments, a total of 1 to 10 amino acids have been substituted, inserted and/or deleted in the amino acid sequence SEQ ID NO: 160. In some embodiments, substitutions, insertions, or deletions occur in regions outside the CDRs (e.g., in the FRs). Optionally, the antibody or antigen-binding fragment thereof comprises the VH sequence SEQ ID NO: 160, including one or more post-translational modifications of that sequence. In a particular embodiment, the VH comprises one, two or three CDRs selected from: a. CDR-H1, comprising the amino acid sequence SEQ ID NO: 702, b. CDR-H2, comprising the amino acid sequence SEQ ID NO: 1244, and c. CDR-H3, comprising the amino acid sequence SEQ ID NO: 1786.

[2114] In one aspect, an antibody or antigen-binding fragment thereof is provided, wherein the antibody or antigen-binding fragment thereof comprises a light chain variable domain (VL) having at least 90%, 91%, 92%, 93%, 94%, 95%, 96%, 97%, 98%, 99%, or 100% sequence identity to the amino acid sequence SEQ ID NO: 431. In some embodiments, a VL sequence having at least 90%, 91%, 92%, 93%, 94%, 95%, 96%, 97%, 98%, or 99% identity contains substitutions (e.g., conservative substitutions), insertions, or deletions relative to the reference sequence, but an antibody or antigen-binding fragment thereof comprising that sequence retains the ability to bind to same antigen as the parent (e.g., cancer associated antigen). In some embodiments, a total of 1 to 10 amino acids have been substituted, inserted and/or deleted in the amino acid sequence SEQ ID NO: 431. In some embodiments, the substitutions, insertions, or deletions occur in regions outside the CDRs (e.g., in the FRs). Optionally, the antibody or antigen-binding fragment thereof comprises the VL sequence SEQ ID NO: 431, including one or more post-translational modifications of that sequence. In a particular embodiment, the VL comprises one, two or three CDRs selected from: a. CDR-L1, comprising the amino acid sequence SEQ ID NO: 973, b. CDR-L2, comprising the amino acid sequence SEQ ID NO: 1515, and c. CDR-L3, comprising the amino acid sequence SEQ ID NO: 2057.

[2115] In one aspect, an antibody or antigen-binding fragment thereof is provided, wherein the antibody or antigen-binding fragment thereof comprises a VH as in any of the embodiments provided above, and a VL as in any of the embodiments provided above. In some embodiments, the antibody or antigen-binding fragment thereof comprises the VH amino acid sequence of SEQ ID NO: 160, and the VL amino acid sequence of SEQ ID NO: 431, optionally including post-translational modifications of those sequences.

### TLUS1003

[2116] In one aspect, the present disclosure provides an antibody or antigen-binding fragment thereof comprising at least one or both variable regions selected from: a. VH comprising the amino acid sequence of SEQ ID NO: 161 and b. VL comprising the amino acid sequence of SEQ ID NO: 432.

[2117] In one aspect, the present disclosure provides an antibody or antigen-binding fragment thereof comprising at least one, two, three, four, five, or six CDRs selected from: a. CDR-H1 comprising the amino acid sequence of SEQ ID NO: 703, b. CDR-H2 comprising the amino acid sequence of SEQ ID NO: 1245, c. CDR-H3 comprising the amino acid sequence of SEQ ID NO: 1787, d. CDR-L1 comprising the amino acid sequence of SEQ ID NO: 974, e. CDR-L2 comprising the amino acid sequence of SEQ ID NO: 1516, and f. CDR-L3 comprising the amino acid sequence of SEQ ID NO: 2058.

[2118] In one aspect, the present disclosure provides an antibody or antigen-binding fragment thereof comprising a CDR-H3 comprising the amino acid sequence of SEQ ID NO: 1787, and a CDR-L3 comprising the amino acid sequence of SEQ ID NO: 2058.

[2119] In one aspect, the present disclosure provides an antibody or antigen-binding fragment thereof comprising at least one, at least two, or all three VH CDR sequences selected from: a. CDR-H1 comprising the amino acid sequence of SEQ ID NO: 703, b. CDR-H2 comprising the amino acid sequence of SEQ ID NO: 1245, c. CDR-H3 comprising the amino acid sequence of SEQ ID NO: 1787, and a VL comprising the amino acid sequence of SEQ ID NO: 432.

[2120] In one aspect, the present disclosure provides an antibody or antigen-binding fragment thereof comprising at least one, at least two, or all three VL CDR sequences selected from: a. CDR-L1 comprising the amino acid sequence of SEQ ID NO: 974, b. CDR-L2 comprising the amino acid sequence of SEQ ID NO: 1516, c. CDR-L3 comprising the amino acid sequence of SEQ ID NO: 2058, and a VH comprising the amino acid sequence of SEQ ID NO: 161.

[2121] In one aspect, an antibody or antigen-binding fragment thereof is provided, wherein the antibody or antigen-binding fragment thereof comprises a heavy chain variable domain (VH) having at least 90%, 91%, 92%, 93%, 94%, 95%, 96%, 97%, 98%, 99%, or 100% sequence identity to the amino acid sequence SEQ ID NO: 161. In some embodiments, a VH sequence having at least 90%, 91%, 92%, 93%, 94%, 95%, 96%, 97%, 98%, or 99% identity contains substitutions (e.g., conservative substitutions), insertions, or deletions relative to the reference sequence, but an antibody or antigen-binding fragment thereof comprising that sequence retains the ability to bind to same antigen as of the parent (e.g., cancer associated antigen). In some embodiments, a total of 1 to 10 amino acids have been substituted, inserted and/or deleted in the amino acid sequence SEQ ID NO: 161. In some embodiments, substitutions, insertions, or deletions occur in regions outside the CDRs (e.g., in the FRs). Optionally, the antibody or antigen-binding fragment thereof comprises the VH sequence SEQ ID NO: 161, including one or more post-translational modifications of that sequence. In a particular embodiment, the VH comprises one, two or three CDRs selected from: a. CDR-H1, comprising the amino acid sequence SEQ ID NO: 703, b. CDR-H2, comprising the amino acid sequence SEQ ID NO: 1245, and c. CDR-H3, comprising the amino acid sequence SEQ ID NO: 1787.

[2122] In one aspect, an antibody or antigen-binding fragment thereof is provided, wherein the antibody or antigen-binding fragment thereof comprises a light chain variable domain (VL) having at least 90%, 91%, 92%, 93%, 94%, 95%, 96%, 97%, 98%, 99%, or 100% sequence identity to the amino acid sequence SEQ ID NO: 432. In some embodiments, a VL sequence having at least 90%, 91%, 92%, 93%, 94%, 95%, 96%, 97%, 98%, or 99% identity contains substitutions (e.g., conservative substitutions), insertions, or deletions relative to the reference sequence, but an antibody or antigen-binding fragment thereof comprising that sequence retains the ability to bind to same antigen as the parent (e.g., cancer associated antigen). In some embodiments, a total of 1 to 10 amino acids have been substituted, inserted and/or deleted in the amino acid sequence SEQ ID NO: 432. In some embodiments, the substitutions, insertions, or deletions occur in regions outside the CDRs (e.g., in the FRs). Optionally, the antibody or antigen-binding fragment thereof comprises the VL sequence SEQ ID NO: 432, including one or more post-translational modifications of that sequence. In a particular embodiment, the VL comprises one, two or three CDRs selected from: a. CDR-L1, comprising the amino acid sequence SEQ ID NO: 974, b. CDR-L2, comprising the amino acid sequence SEQ ID NO: 1516, and c. CDR-L3, comprising the amino acid sequence SEQ ID NO: 2058.

[2123] In one aspect, an antibody or antigen-binding fragment thereof is provided, wherein the antibody or antigen-binding fragment thereof comprises a VH as in any of the embodiments provided above, and a VL as in any of the embodiments provided above. In some embodiments, the antibody or antigen-binding fragment thereof comprises the VH amino acid sequence of SEQ ID NO: 161, and the VL amino acid sequence of SEQ ID NO: 432, optionally including post-translational modifications of those sequences.

### TLUS1004

[2124] In one aspect, the present disclosure provides an antibody or antigen-binding fragment thereof comprising at least one or both variable regions selected from: a. VH comprising the amino acid sequence of SEQ ID NO: 162 and b. VL comprising the amino acid sequence of SEQ ID NO: 433.

[2125] In one aspect, the present disclosure provides an antibody or antigen-binding fragment thereof comprising at least one, two, three, four, five, or six CDRs selected from: a. CDR-H1 comprising the amino acid sequence of SEQ ID NO: 704, b. CDR-H2 comprising the amino acid sequence of SEQ ID NO: 1246, c. CDR-H3 comprising the amino acid sequence of SEQ ID NO: 1788, d. CDR-L1 comprising the amino acid sequence of SEQ ID NO: 975, e. CDR-L2 comprising the amino acid sequence of SEQ ID NO: 1517, and f. CDR-L3 comprising the amino acid sequence of SEQ ID NO: 2059.

[2126] In one aspect, the present disclosure provides an antibody or antigen-binding fragment thereof comprising a CDR-H3 comprising the amino acid sequence of SEQ ID NO: 1788, and a CDR-L3 comprising the amino acid sequence of SEQ ID NO: 2059.

[2127] In one aspect, the present disclosure provides an antibody or antigen-binding fragment thereof comprising at least one, at least two, or all three VH CDR sequences selected from: a. CDR-H1 comprising the amino acid sequence of SEQ ID NO: 704, b. CDR-H2 comprising the amino acid sequence of SEQ ID NO: 1246, c. CDR-H3 comprising the amino acid sequence of SEQ ID NO: 1788, and a VL comprising the amino acid sequence of SEQ ID NO: 433.

[2128] In one aspect, the present disclosure provides an antibody or antigen-binding fragment thereof comprising at least one, at least two, or all three VL CDR sequences selected from: a. CDR-L1 comprising the amino acid sequence of SEQ ID NO: 975, b. CDR-L2 comprising the amino acid sequence of SEQ ID NO: 1517, c. CDR-L3 comprising the amino acid sequence of SEQ ID NO: 2059, and a VH comprising the amino acid sequence of SEQ ID NO: 162.

[2129] In one aspect, an antibody or antigen-binding fragment thereof is provided, wherein the antibody or antigen-binding fragment thereof comprises a heavy chain variable domain (VH) having at least 90%, 91%, 92%, 93%, 94%, 95%, 96%, 97%, 98%, 99%, or 100% sequence identity to the amino acid sequence SEQ ID NO: 162. In some embodiments, a VH sequence having at least 90%, 91%, 92%, 93%, 94%, 95%, 96%, 97%, 98%, or 99% identity contains substitutions (e.g., conservative substitutions), insertions, or deletions relative to the reference sequence, but an antibody or antigen-binding fragment thereof comprising that sequence retains the ability to bind to same antigen as of the parent (e.g., cancer associated antigen). In some embodiments, a total of 1 to 10 amino acids have been substituted, inserted and/or deleted in the amino acid sequence SEQ ID NO: 162. In some embodiments, substitutions, insertions, or deletions occur in regions outside the CDRs (e.g., in the FRs). Optionally, the antibody or antigen-binding fragment thereof comprises the VH sequence SEQ ID NO: 162, including one or more post-translational modifications of that sequence. In a particular embodiment, the VH comprises one, two or three CDRs selected from: a. CDR-H1, comprising the amino acid sequence SEQ ID NO: 704, b. CDR-H2, comprising the amino acid sequence SEQ ID NO: 1246, and c. CDR-H3, comprising the amino acid sequence SEQ ID NO: 1788.

[2130] In one aspect, an antibody or antigen-binding fragment thereof is provided, wherein the antibody or antigen-binding fragment thereof comprises a light chain variable domain (VL) having at least 90%, 91%, 92%, 93%, 94%, 95%, 96%, 97%, 98%, 99%, or 100% sequence identity to the amino acid sequence SEQ ID NO: 433. In some embodiments, a VL sequence having at least 90%, 91%, 92%, 93%, 94%, 95%, 96%, 97%, 98%, or 99% identity contains substitutions (e.g., conservative substitutions), insertions, or deletions relative to the reference sequence, but an antibody or antigen-binding fragment thereof comprising that sequence retains the ability to bind to same antigen as the parent (e.g., cancer associated antigen). In some embodiments, a total of 1 to 10 amino acids have been substituted, inserted and/or deleted in the amino acid sequence SEQ ID NO: 433. In some embodiments, the substitutions, insertions, or deletions occur in regions outside the CDRs (e.g., in the FRs). Optionally, the antibody or antigen-binding fragment thereof comprises the VL sequence SEQ ID NO: 433, including one or more post-translational modifications of that sequence. In a particular embodiment, the VL comprises one, two or three CDRs selected from: a. CDR-L1, comprising the amino acid sequence SEQ ID NO: 975, b. CDR-L2, comprising the amino acid sequence SEQ ID NO: 1517, and c. CDR-L3, comprising the amino acid sequence SEQ ID NO: 2059.

[2131] In one aspect, an antibody or antigen-binding fragment thereof is provided, wherein the antibody or antigen-binding fragment thereof comprises a VH as in any of the embodiments provided above, and a VL as in any of the embodiments provided above. In some embodiments, the antibody or antigen-binding fragment thereof comprises the VH amino acid sequence of SEQ ID NO: 162, and the VL amino acid sequence of SEQ ID NO: 433, optionally including post-translational modifications of those sequences.

### TLUS1005

[2132] In one aspect, the present disclosure provides an antibody or antigen-binding fragment thereof comprising at least one or both variable regions selected from: a. VH comprising the amino acid sequence of SEQ ID NO: 163 and b. VL comprising the amino acid sequence of SEQ ID NO: 434.

[2133] In one aspect, the present disclosure provides an antibody or antigen-binding fragment thereof comprising at least one, two, three, four, five, or six CDRs selected from: a. CDR-H1 comprising the amino acid sequence of SEQ ID NO: 705, b. CDR-H2 comprising the amino acid sequence of SEQ ID NO: 1247, c. CDR-H3 comprising the amino acid sequence of SEQ ID NO: 1789, d. CDR-L1 comprising the amino acid sequence of SEQ ID NO: 976, e. CDR-L2 comprising the amino acid sequence of SEQ ID NO: 1518, and f. CDR-L3 comprising the amino acid sequence of SEQ ID NO: 2060.

[2134] In one aspect, the present disclosure provides an antibody or antigen-binding fragment thereof comprising a CDR-H3 comprising the amino acid sequence of SEQ ID NO: 1789, and a CDR-L3 comprising the amino acid sequence of SEQ ID NO: 2060.

[2135] In one aspect, the present disclosure provides an antibody or antigen-binding fragment thereof comprising at least one, at least two, or all three VH CDR sequences selected from: a. CDR-H1 comprising the amino acid sequence of SEQ ID NO: 705, b. CDR-H2 comprising the amino acid sequence of SEQ ID NO: 1247, c. CDR-H3 comprising the amino acid sequence of SEQ ID NO: 1789, and a VL comprising the amino acid sequence of SEQ ID NO: 434.

[2136] In one aspect, the present disclosure provides an antibody or antigen-binding fragment thereof comprising at least one, at least two, or all three VL CDR sequences selected from: a. CDR-L1 comprising the amino acid sequence of SEQ ID NO: 976, b. CDR-L2 comprising the amino acid sequence of SEQ ID NO: 1518, c. CDR-L3 comprising the amino acid sequence of SEQ ID NO: 2060, and a VH comprising the amino acid sequence of SEQ ID NO: 163.

[2137] In one aspect, an antibody or antigen-binding fragment thereof is provided, wherein the antibody or antigen-binding fragment thereof comprises a heavy chain variable domain (VH) having at least 90%, 91%, 92%, 93%, 94%, 95%, 96%, 97%, 98%, 99%, or 100% sequence identity to the amino acid sequence SEQ ID NO: 163. In some embodiments, a VH sequence having at least 90%, 91%, 92%, 93%, 94%, 95%, 96%, 97%, 98%, or 99% identity contains substitutions (e.g., conservative substitutions), insertions, or deletions relative to the reference sequence, but an antibody or antigen-binding fragment thereof comprising that sequence retains the ability to bind to same antigen as of the parent (e.g., cancer associated antigen). In some embodiments, a total of 1 to 10 amino acids have been substituted, inserted and/or deleted in the amino acid sequence SEQ ID NO: 163. In some embodiments, substitutions, insertions, or deletions occur in regions outside the CDRs (e.g., in the FRs). Optionally, the antibody or antigen-binding fragment thereof comprises the VH sequence SEQ ID NO: 163, including one or more post-translational modifications of that sequence. In a particular embodiment, the VH comprises one, two or three CDRs selected from: a. CDR-H1, comprising the amino acid sequence SEQ ID NO: 705, b. CDR-H2, comprising the amino acid sequence SEQ ID NO: 1247, and c. CDR-H3, comprising the amino acid sequence SEQ ID NO: 1789.

[2138] In one aspect, an antibody or antigen-binding fragment thereof is provided, wherein the antibody or antigen-binding fragment thereof comprises a light chain variable domain (VL) having at least 90%, 91%, 92%, 93%, 94%, 95%, 96%, 97%, 98%, 99%, or 100% sequence identity to the amino acid sequence SEQ ID NO: 434. In some embodiments, a VL sequence having at least 90%, 91%, 92%, 93%, 94%, 95%, 96%, 97%, 98%, or 99% identity contains substitutions (e.g., conservative substitutions), insertions, or deletions relative to the reference sequence, but an antibody or antigen-binding fragment thereof comprising that sequence retains the ability to bind to same antigen as the parent (e.g., cancer associated antigen). In some embodiments, a total of 1 to 10 amino acids have been substituted, inserted and/or deleted in the amino acid sequence SEQ ID NO: 434. In some embodiments, the substitutions, insertions, or deletions occur in regions outside the CDRs (e.g., in the FRs). Optionally, the antibody or antigen-binding fragment thereof comprises the VL sequence SEQ ID NO: 434, including one or more post-translational modifications of that sequence. In a particular embodiment, the VL comprises one, two or three CDRs selected from: a. CDR-L1, comprising the amino acid sequence SEQ ID NO: 976, b. CDR-L2, comprising the amino acid sequence SEQ ID NO: 1518, and c. CDR-L3, comprising the amino acid sequence SEQ ID NO: 2060.

[2139] In one aspect, an antibody or antigen-binding fragment thereof is provided, wherein the antibody or antigen-binding fragment thereof comprises a VH as in any of the embodiments provided above, and a VL as in any of the embodiments provided above. In some embodiments, the antibody or antigen-binding fragment thereof comprises the VH amino acid sequence of SEQ ID NO: 163, and the VL amino acid sequence of SEQ ID NO: 434, optionally including post-translational modifications of those sequences.

### TLUS1006

[2140] In one aspect, the present disclosure provides an antibody or antigen-binding fragment thereof comprising at least one or both variable regions selected from: a. VH comprising the amino acid sequence of SEQ ID NO: 164 and b. VL comprising the amino acid sequence of SEQ ID NO: 435.

[2141] In one aspect, the present disclosure provides an antibody or antigen-binding fragment thereof comprising at least one, two, three, four, five, or six CDRs selected from: a. CDR-H1 comprising the amino acid sequence of SEQ ID NO: 706, b. CDR-H2 comprising the amino acid sequence of SEQ ID NO: 1248, c. CDR-H3 comprising the amino acid sequence of SEQ ID NO: 1790, d. CDR-L1 comprising the amino acid sequence of SEQ ID NO: 977, e. CDR-L2 comprising the amino acid sequence of SEQ ID NO: 1519, and f. CDR-L3 comprising the amino acid sequence of SEQ ID NO: 2061.

[2142] In one aspect, the present disclosure provides an antibody or antigen-binding fragment thereof comprising a CDR-H3 comprising the amino acid sequence of SEQ ID NO: 1790, and a CDR-L3 comprising the amino acid sequence of SEQ ID NO: 2061.

[2143] In one aspect, the present disclosure provides an antibody or antigen-binding fragment thereof comprising at least one, at least two, or all three VH CDR sequences selected from: a. CDR-H1 comprising the amino acid sequence of SEQ ID NO: 706, b. CDR-H2 comprising the amino acid sequence of SEQ ID NO: 1248, c. CDR-H3 comprising the amino acid sequence of SEQ ID NO: 1790, and a VL comprising the amino acid sequence of SEQ ID NO: 435.

[2144] In one aspect, the present disclosure provides an antibody or antigen-binding fragment thereof comprising at least one, at least two, or all three VL CDR sequences selected from: a. CDR-L1 comprising the amino acid sequence of SEQ ID NO: 977, b. CDR-L2 comprising the amino acid sequence of SEQ ID NO: 1519, c. CDR-L3 comprising the amino acid sequence of SEQ ID NO: 2061, and a VH comprising the amino acid sequence of SEQ ID NO: 164.

[2145] In one aspect, an antibody or antigen-binding fragment thereof is provided, wherein the antibody or antigen-binding fragment thereof comprises a heavy chain variable domain (VH) having at least 90%, 91%, 92%, 93%, 94%, 95%, 96%, 97%, 98%, 99%, or 100% sequence identity to the amino acid sequence SEQ ID NO: 164. In some embodiments, a VH sequence having at least 90%, 91%, 92%, 93%, 94%, 95%, 96%, 97%, 98%, or 99% identity contains substitutions (e.g., conservative substitutions), insertions, or deletions relative to the reference sequence, but an antibody or antigen-binding fragment thereof comprising that sequence retains the ability to bind to same antigen as of the parent (e.g., cancer associated antigen). In some embodiments, a total of 1 to 10 amino acids have been substituted, inserted and/or deleted in the amino acid sequence SEQ ID NO: 164. In some embodiments, substitutions, insertions, or deletions occur in regions outside the CDRs (e.g., in the FRs). Optionally, the antibody or antigen-binding fragment thereof comprises the VH sequence SEQ ID NO: 164, including one or more post-translational modifications of that sequence. In a particular embodiment, the VH comprises one, two or three CDRs selected from: a. CDR-H1, comprising the amino acid sequence SEQ ID NO: 706, b. CDR-H2, comprising the amino acid sequence SEQ ID NO: 1248, and c. CDR-H3, comprising the amino acid sequence SEQ ID NO: 1790.

[2146] In one aspect, an antibody or antigen-binding fragment thereof is provided, wherein the antibody or antigen-binding fragment thereof comprises a light chain variable domain (VL) having at least 90%, 91%, 92%, 93%, 94%, 95%, 96%, 97%, 98%, 99%, or 100% sequence identity to the amino acid sequence SEQ ID NO: 435. In some embodiments, a VL sequence having at least 90%, 91%, 92%, 93%, 94%, 95%, 96%, 97%, 98%, or 99% identity contains substitutions (e.g., conservative substitutions), insertions, or deletions relative to the reference sequence, but an antibody or antigen-binding fragment thereof comprising that sequence retains the ability to bind to same antigen as the parent (e.g., cancer associated antigen). In some embodiments, a total of 1 to 10 amino acids have been substituted, inserted and/or deleted in the amino acid sequence SEQ ID NO: 435. In some embodiments, the substitutions, insertions, or deletions occur in regions outside the CDRs (e.g., in the FRs). Optionally, the antibody or antigen-binding fragment thereof comprises the VL sequence SEQ ID NO: 435, including one or more post-translational modifications of that sequence. In a particular embodiment, the VL comprises one, two or three CDRs selected from: a. CDR-L1, comprising the amino acid sequence SEQ ID NO: 977, b. CDR-L2, comprising the amino acid sequence SEQ ID NO: 1519, and c. CDR-L3, comprising the amino acid sequence SEQ ID NO: 2061.

[2147] In one aspect, an antibody or antigen-binding fragment thereof is provided, wherein the antibody or antigen-binding fragment thereof comprises a VH as in any of the embodiments provided above, and a VL as in any of the embodiments provided above. In some embodiments, the antibody or antigen-binding fragment thereof comprises the VH amino acid sequence of SEQ ID NO: 164, and the VL amino acid sequence of SEQ ID NO: 435, optionally including post-translational modifications of those sequences.

### TLUS1007

[2148] In one aspect, the present disclosure provides an antibody or antigen-binding fragment thereof comprising at least one or both variable regions selected from: a. VH comprising the amino acid sequence of SEQ ID NO: 165 and b. VL comprising the amino acid sequence of SEQ ID NO: 436.

[2149] In one aspect, the present disclosure provides an antibody or antigen-binding fragment thereof comprising at least one, two, three, four, five, or six CDRs selected from: a. CDR-H1 comprising the amino acid sequence of SEQ ID NO: 707, b. CDR-H2 comprising the amino acid sequence of SEQ ID NO: 1249, c. CDR-H3 comprising the amino acid sequence of SEQ ID NO: 1791, d. CDR-L1 comprising the amino acid sequence of SEQ ID NO: 978, e. CDR-L2 comprising the amino acid sequence of SEQ ID NO: 1520, and f. CDR-L3 comprising the amino acid sequence of SEQ ID NO: 2062.

[2150] In one aspect, the present disclosure provides an antibody or antigen-binding fragment thereof comprising a CDR-H3 comprising the amino acid sequence of SEQ ID NO: 1791, and a CDR-L3 comprising the amino acid sequence of SEQ ID NO: 2062.

[2151] In one aspect, the present disclosure provides an antibody or antigen-binding fragment thereof comprising at least one, at least two, or all three VH CDR sequences selected from: a. CDR-H1 comprising the amino acid sequence of SEQ ID NO: 707, b. CDR-H2 comprising the amino acid sequence of SEQ ID NO: 1249, c. CDR-H3 comprising the amino acid sequence of SEQ ID NO: 1791, and a VL comprising the amino acid sequence of SEQ ID NO: 436.

[2152] In one aspect, the present disclosure provides an antibody or antigen-binding fragment thereof comprising at least one, at least two, or all three VL CDR sequences selected from: a. CDR-L1 comprising the amino acid sequence of SEQ ID NO: 978, b. CDR-L2 comprising the amino acid sequence of SEQ ID NO: 1520, c. CDR-L3 comprising the amino acid sequence of SEQ ID NO: 2062, and a VH comprising the amino acid sequence of SEQ ID NO: 165.

[2153] In one aspect, an antibody or antigen-binding fragment thereof is provided, wherein the antibody or antigen-binding fragment thereof comprises a heavy chain variable domain (VH) having at least 90%, 91%, 92%, 93%, 94%, 95%, 96%, 97%, 98%, 99%, or 100% sequence identity to the amino acid sequence SEQ ID NO: 165. In some embodiments, a VH sequence having at least 90%, 91%, 92%, 93%, 94%, 95%, 96%, 97%, 98%, or 99% identity contains substitutions (e.g., conservative substitutions), insertions, or deletions relative to the reference sequence, but an antibody or antigen-binding fragment thereof comprising that sequence retains the ability to bind to same antigen as of the parent (e.g., cancer associated antigen). In some embodiments, a total of 1 to 10 amino acids have been substituted, inserted and/or deleted in the amino acid sequence SEQ ID NO: 165. In some embodiments, substitutions, insertions, or deletions occur in regions outside the CDRs (e.g., in the FRs). Optionally, the antibody or antigen-binding fragment thereof comprises the VH sequence SEQ ID NO: 165, including one or more post-translational modifications of that sequence. In a particular embodiment, the VH comprises one, two or three CDRs selected from: a. CDR-H1, comprising the amino acid sequence SEQ ID NO: 707, b. CDR-H2, comprising the amino acid sequence SEQ ID NO: 1249, and c. CDR-H3, comprising the amino acid sequence SEQ ID NO: 1791.

[2154] In one aspect, an antibody or antigen-binding fragment thereof is provided, wherein the antibody or antigen-binding fragment thereof comprises a light chain variable domain (VL) having at least 90%, 91%, 92%, 93%, 94%, 95%, 96%, 97%, 98%, 99%, or 100% sequence identity to the amino acid sequence SEQ ID NO: 436. In some embodiments, a VL sequence having at least 90%, 91%, 92%, 93%, 94%, 95%, 96%, 97%, 98%, or 99% identity contains substitutions (e.g., conservative substitutions), insertions, or deletions relative to the reference sequence, but an antibody or antigen-binding fragment thereof comprising that sequence retains the ability to bind to same antigen as the parent (e.g., cancer associated antigen). In some embodiments, a total of 1 to 10 amino acids have been substituted, inserted and/or deleted in the amino acid sequence SEQ ID NO: 436. In some embodiments, the substitutions, insertions, or deletions occur in regions outside the CDRs (e.g., in the FRs). Optionally, the antibody or antigen-binding fragment thereof comprises the VL sequence SEQ ID NO: 436, including one or more post-translational modifications of that sequence. In a particular embodiment, the VL comprises one, two or three CDRs selected from: a. CDR-L1, comprising the amino acid sequence SEQ ID NO: 978, b. CDR-L2, comprising the amino acid sequence SEQ ID NO: 1520, and c. CDR-L3, comprising the amino acid sequence SEQ ID NO: 2062.

[2155] In one aspect, an antibody or antigen-binding fragment thereof is provided, wherein the antibody or antigen-binding fragment thereof comprises a VH as in any of the embodiments provided above, and a VL as in any of the embodiments provided above. In some embodiments, the antibody or antigen-binding fragment thereof comprises the VH amino acid sequence of SEQ ID NO: 165, and the VL amino acid sequence of SEQ ID NO: 436, optionally including post-translational modifications of those sequences.

### TLUS1008

[2156] In one aspect, the present disclosure provides an antibody or antigen-binding fragment thereof comprising at least one or both variable regions selected from: a. VH comprising the amino acid sequence of SEQ ID NO: 166 and b. VL comprising the amino acid sequence of SEQ ID NO: 437.

[2157] In one aspect, the present disclosure provides an antibody or antigen-binding fragment thereof comprising at least one, two, three, four, five, or six CDRs selected from: a. CDR-H1 comprising the amino acid sequence of SEQ ID NO: 708, b. CDR-H2 comprising the amino acid sequence of SEQ ID NO: 1250, c. CDR-H3 comprising the amino acid sequence of SEQ ID NO: 1792, d. CDR-L1 comprising the amino acid sequence of SEQ ID NO: 979, e. CDR-L2 comprising the amino acid sequence of SEQ ID NO: 1521, and f. CDR-L3 comprising the amino acid sequence of SEQ ID NO: 2063.

[2158] In one aspect, the present disclosure provides an antibody or antigen-binding fragment thereof comprising a CDR-H3 comprising the amino acid sequence of SEQ ID NO: 1792, and a CDR-L3 comprising the amino acid sequence of SEQ ID NO: 2063.

[2159] In one aspect, the present disclosure provides an antibody or antigen-binding fragment thereof comprising at least one, at least two, or all three VH CDR sequences selected from: a. CDR-H1 comprising the amino acid sequence of SEQ ID NO: 708, b. CDR-H2 comprising the amino acid sequence of SEQ ID NO: 1250, c. CDR-H3 comprising the amino acid sequence of SEQ ID NO: 1792, and a VL comprising the amino acid sequence of SEQ ID NO: 437.

[2160] In one aspect, the present disclosure provides an antibody or antigen-binding fragment thereof comprising at least one, at least two, or all three VL CDR sequences selected from: a. CDR-L1 comprising the amino acid sequence of SEQ ID NO: 979, b. CDR-L2 comprising the amino acid sequence of SEQ ID NO: 1521, c. CDR-L3 comprising the amino acid sequence of SEQ ID NO: 2063, and a VH comprising the amino acid sequence of SEQ ID NO: 166.

[2161] In one aspect, an antibody or antigen-binding fragment thereof is provided, wherein the antibody or antigen-binding fragment thereof comprises a heavy chain variable domain (VH) having at least 90%, 91%, 92%, 93%, 94%, 95%, 96%, 97%, 98%, 99%, or 100% sequence identity to the amino acid sequence SEQ ID NO: 166. In some embodiments, a VH sequence having at least 90%, 91%, 92%, 93%, 94%, 95%, 96%, 97%, 98%, or 99% identity contains substitutions (e.g., conservative substitutions), insertions, or deletions relative to the reference sequence, but an antibody or antigen-binding fragment thereof comprising that sequence retains the ability to bind to same antigen as of the parent (e.g., cancer associated antigen). In some embodiments, a total of 1 to 10 amino acids have been substituted, inserted and/or deleted in the amino acid sequence SEQ ID NO: 166. In some embodiments, substitutions, insertions, or deletions occur in regions outside the CDRs (e.g., in the FRs). Optionally, the antibody or antigen-binding fragment thereof comprises the VH sequence SEQ ID NO: 166, including one or more post-translational modifications of that sequence. In a particular embodiment, the VH comprises one, two or three CDRs selected from: a. CDR-H1, comprising the amino acid sequence SEQ ID NO: 708, b. CDR-H2, comprising the amino acid sequence SEQ ID NO: 1250, and c. CDR-H3, comprising the amino acid sequence SEQ ID NO: 1792.

[2162] In one aspect, an antibody or antigen-binding fragment thereof is provided, wherein the antibody or antigen-binding fragment thereof comprises a light chain variable domain (VL) having at least 90%, 91%, 92%, 93%, 94%, 95%, 96%, 97%, 98%, 99%, or 100% sequence identity to the amino acid sequence SEQ ID NO: 437. In some embodiments, a VL sequence having at least 90%, 91%, 92%, 93%, 94%, 95%, 96%, 97%, 98%, or 99% identity contains substitutions (e.g., conservative substitutions), insertions, or deletions relative to the reference sequence, but an antibody or antigen-binding fragment thereof comprising that sequence retains the ability to bind to same antigen as the parent (e.g., cancer associated antigen). In some embodiments, a total of 1 to 10 amino acids have been substituted, inserted and/or deleted in the amino acid sequence SEQ ID NO: 437. In some embodiments, the substitutions, insertions, or deletions occur in regions outside the CDRs (e.g., in the FRs). Optionally, the antibody or antigen-binding fragment thereof comprises the VL sequence SEQ ID NO: 437, including one or more post-translational modifications of that sequence. In a particular embodiment, the VL comprises one, two or three CDRs selected from: a. CDR-L1, comprising the amino acid sequence SEQ ID NO: 979, b. CDR-L2, comprising the amino acid sequence SEQ ID NO: 1521, and c. CDR-L3, comprising the amino acid sequence SEQ ID NO: 2063.

[2163] In one aspect, an antibody or antigen-binding fragment thereof is provided, wherein the antibody or antigen-binding fragment thereof comprises a VH as in any of the embodiments provided above, and a VL as in any of the embodiments provided above. In some embodiments, the antibody or antigen-binding fragment thereof comprises the VH amino acid sequence of SEQ ID NO: 166, and the VL amino acid sequence of SEQ ID NO: 437, optionally including post-translational modifications of those sequences.

### TLUS1009

[2164] In one aspect, the present disclosure provides an antibody or antigen-binding fragment thereof comprising at least one or both variable regions selected from: a. VH comprising the amino acid sequence of SEQ ID NO: 167 and b. VL comprising the amino acid sequence of SEQ ID NO: 438.

[2165] In one aspect, the present disclosure provides an antibody or antigen-binding fragment thereof comprising at least one, two, three, four, five, or six CDRs selected from: a. CDR-H1 comprising the amino acid sequence of SEQ ID NO: 709, b. CDR-H2 comprising the amino acid sequence of SEQ ID NO: 1251, c. CDR-H3 comprising the amino acid sequence of SEQ ID NO: 1793, d. CDR-L1 comprising the amino acid sequence of SEQ ID NO: 980, e. CDR-L2 comprising the amino acid sequence of SEQ ID NO: 1522, and f. CDR-L3 comprising the amino acid sequence of SEQ ID NO: 2064.

[2166] In one aspect, the present disclosure provides an antibody or antigen-binding fragment thereof comprising a CDR-H3 comprising the amino acid sequence of SEQ ID NO: 1793, and a CDR-L3 comprising the amino acid sequence of SEQ ID NO: 2064.

[2167] In one aspect, the present disclosure provides an antibody or antigen-binding fragment thereof comprising at least one, at least two, or all three VH CDR sequences selected from: a. CDR-H1 comprising the amino acid sequence of SEQ ID NO: 709, b. CDR-H2 comprising the amino acid sequence of SEQ ID NO: 1251, c. CDR-H3 comprising the amino acid sequence of SEQ ID NO: 1793, and a VL comprising the amino acid sequence of SEQ ID NO: 438.

[2168] In one aspect, the present disclosure provides an antibody or antigen-binding fragment thereof comprising at least one, at least two, or all three VL CDR sequences selected from: a. CDR-L1 comprising the amino acid sequence of SEQ ID NO: 980, b. CDR-L2 comprising the amino acid sequence of SEQ ID NO: 1522, c. CDR-L3 comprising the amino acid sequence of SEQ ID NO: 2064, and a VH comprising the amino acid sequence of SEQ ID NO: 167.

[2169] In one aspect, an antibody or antigen-binding fragment thereof is provided, wherein the antibody or antigen-binding fragment thereof comprises a heavy chain variable domain (VH) having at least 90%, 91%, 92%, 93%, 94%, 95%, 96%, 97%, 98%, 99%, or 100% sequence identity to the amino acid sequence SEQ ID NO: 167. In some embodiments, a VH sequence having at least 90%, 91%, 92%, 93%, 94%, 95%, 96%, 97%, 98%, or 99% identity contains substitutions (e.g., conservative substitutions), insertions, or deletions relative to the reference sequence, but an antibody or antigen-binding fragment thereof comprising that sequence retains the ability to bind to same antigen as of the parent (e.g., cancer associated antigen). In some embodiments, a total of 1 to 10 amino acids have been substituted, inserted and/or deleted in the amino acid sequence SEQ ID NO: 167. In some embodiments, substitutions, insertions, or deletions occur in regions outside the CDRs (e.g., in the FRs). Optionally, the antibody or antigen-binding fragment thereof comprises the VH sequence SEQ ID NO: 167, including one or more post-translational modifications of that sequence. In a particular embodiment, the VH comprises one, two or three CDRs selected from: a. CDR-H1, comprising the amino acid sequence SEQ ID NO: 709, b. CDR-H2, comprising the amino acid sequence SEQ ID NO: 1251, and c. CDR-H3, comprising the amino acid sequence SEQ ID NO: 1793.

[2170] In one aspect, an antibody or antigen-binding fragment thereof is provided, wherein the antibody or antigen-binding fragment thereof comprises a light chain variable domain (VL) having at least 90%, 91%, 92%, 93%, 94%, 95%, 96%, 97%, 98%, 99%, or 100% sequence identity to the amino acid sequence SEQ ID NO: 438. In some embodiments, a VL sequence having at least 90%, 91%, 92%, 93%, 94%, 95%, 96%, 97%, 98%, or 99% identity contains substitutions (e.g., conservative substitutions), insertions, or deletions relative to the reference sequence, but an antibody or antigen-binding fragment thereof comprising that sequence retains the ability to bind to same antigen as the parent (e.g., cancer associated antigen). In some embodiments, a total of 1 to 10 amino acids have been substituted, inserted and/or deleted in the amino acid sequence SEQ ID NO: 438. In some embodiments, the substitutions, insertions, or deletions occur in regions outside the CDRs (e.g., in the FRs). Optionally, the antibody or antigen-binding fragment thereof comprises the VL sequence SEQ ID NO: 438, including one or more post-translational modifications of that sequence. In a particular embodiment, the VL comprises one, two or three CDRs selected from: a. CDR-L1, comprising the amino acid sequence SEQ ID NO: 980, b. CDR-L2, comprising the amino acid sequence SEQ ID NO: 1522, and c. CDR-L3, comprising the amino acid sequence SEQ ID NO: 2064.

[2171] In one aspect, an antibody or antigen-binding fragment thereof is provided, wherein the antibody or antigen-binding fragment thereof comprises a VH as in any of the embodiments provided above, and a VL as in any of the embodiments provided above. In some embodiments, the antibody or antigen-binding fragment thereof comprises the VH amino acid sequence of SEQ ID NO: 167, and the VL amino acid sequence of SEQ ID NO: 438, optionally including post-translational modifications of those sequences.

### TLUS1010

[2172] In one aspect, the present disclosure provides an antibody or antigen-binding fragment thereof comprising at least one or both variable regions selected from: a. VH comprising the amino acid sequence of SEQ ID NO: 168 and b. VL comprising the amino acid sequence of SEQ ID NO: 439.

[2173] In one aspect, the present disclosure provides an antibody or antigen-binding fragment thereof comprising at least one, two, three, four, five, or six CDRs selected from: a. CDR-H1 comprising the amino acid sequence of SEQ ID NO: 710, b. CDR-H2 comprising the amino acid sequence of SEQ ID NO: 1252, c. CDR-H3 comprising the amino acid sequence of SEQ ID NO: 1794, d. CDR-L1 comprising the amino acid sequence of SEQ ID NO: 981, e. CDR-L2 comprising the amino acid sequence of SEQ ID NO: 1523, and f. CDR-L3 comprising the amino acid sequence of SEQ ID NO: 2065.

[2174] In one aspect, the present disclosure provides an antibody or antigen-binding fragment thereof comprising a CDR-H3 comprising the amino acid sequence of SEQ ID NO: 1794, and a CDR-L3 comprising the amino acid sequence of SEQ ID NO: 2065.

[2175] In one aspect, the present disclosure provides an antibody or antigen-binding fragment thereof comprising at least one, at least two, or all three VH CDR sequences selected from: a. CDR-H1 comprising the amino acid sequence of SEQ ID NO: 710, b. CDR-H2 comprising the amino acid sequence of SEQ ID NO: 1252, c. CDR-H3 comprising the amino acid sequence of SEQ ID NO: 1794, and a VL comprising the amino acid sequence of SEQ ID NO: 439.

[2176] In one aspect, the present disclosure provides an antibody or antigen-binding fragment thereof comprising at least one, at least two, or all three VL CDR sequences selected from: a. CDR-L1 comprising the amino acid sequence of SEQ ID NO: 981, b. CDR-L2 comprising the amino acid sequence of SEQ ID NO: 1523, c. CDR-L3 comprising the amino acid sequence of SEQ ID NO: 2065, and a VH comprising the amino acid sequence of SEQ ID NO: 168.

[2177] In one aspect, an antibody or antigen-binding fragment thereof is provided, wherein the antibody or antigen-binding fragment thereof comprises a heavy chain variable domain (VH) having at least 90%, 91%, 92%, 93%, 94%, 95%, 96%, 97%, 98%, 99%, or 100% sequence identity to the amino acid sequence SEQ ID NO: 168. In some embodiments, a VH sequence having at least 90%, 91%, 92%, 93%, 94%, 95%, 96%, 97%, 98%, or 99% identity contains substitutions (e.g., conservative substitutions), insertions, or deletions relative to the reference sequence, but an antibody or antigen-binding fragment thereof comprising that sequence retains the ability to bind to same antigen as of the parent (e.g., cancer associated antigen). In some embodiments, a total of 1 to 10 amino acids have been substituted, inserted and/or deleted in the amino acid sequence SEQ ID NO: 168. In some embodiments, substitutions, insertions, or deletions occur in regions outside the CDRs (e.g., in the FRs). Optionally, the antibody or antigen-binding fragment thereof comprises the VH sequence SEQ ID NO: 168, including one or more post-translational modifications of that sequence. In a particular embodiment, the VH comprises one, two or three CDRs selected from: a. CDR-H1, comprising the amino acid sequence SEQ ID NO: 710, b. CDR-H2, comprising the amino acid sequence SEQ ID NO: 1252, and c. CDR-H3, comprising the amino acid sequence SEQ ID NO: 1794.

[2178] In one aspect, an antibody or antigen-binding fragment thereof is provided, wherein the antibody or antigen-binding fragment thereof comprises a light chain variable domain (VL) having at least 90%, 91%, 92%, 93%, 94%, 95%, 96%, 97%, 98%, 99%, or 100% sequence identity to the amino acid sequence SEQ ID NO: 439. In some embodiments, a VL sequence having at least 90%, 91%, 92%, 93%, 94%, 95%, 96%, 97%, 98%, or 99% identity contains substitutions (e.g., conservative substitutions), insertions, or deletions relative to the reference sequence, but an antibody or antigen-binding fragment thereof comprising that sequence retains the ability to bind to same antigen as the parent (e.g., cancer associated antigen). In some embodiments, a total of 1 to 10 amino acids have been substituted, inserted and/or deleted in the amino acid sequence SEQ ID NO: 439. In some embodiments, the substitutions, insertions, or deletions occur in regions outside the CDRs (e.g., in the FRs). Optionally, the antibody or antigen-binding fragment thereof comprises the VL sequence SEQ ID NO: 439, including one or more post-translational modifications of that sequence. In a particular embodiment, the VL comprises one, two or three CDRs selected from: a. CDR-L1, comprising the amino acid sequence SEQ ID NO: 981, b. CDR-L2, comprising the amino acid sequence SEQ ID NO: 1523, and c. CDR-L3, comprising the amino acid sequence SEQ ID NO: 2065.

[2179] In one aspect, an antibody or antigen-binding fragment thereof is provided, wherein the antibody or antigen-binding fragment thereof comprises a VH as in any of the embodiments provided above, and a VL as in any of the embodiments provided above. In some embodiments, the antibody or antigen-binding fragment thereof comprises the VH amino acid sequence of SEQ ID NO: 168, and the VL amino acid sequence of SEQ ID NO: 439, optionally including post-translational modifications of those sequences.

### TLUS1011

[2180] In one aspect, the present disclosure provides an antibody or antigen-binding fragment thereof comprising at least one or both variable regions selected from: a. VH comprising the amino acid sequence of SEQ ID NO: 169 and b. VL comprising the amino acid sequence of SEQ ID NO: 440.

[2181] In one aspect, the present disclosure provides an antibody or antigen-binding fragment thereof comprising at least one, two, three, four, five, or six CDRs selected from: a. CDR-H1 comprising the amino acid sequence of SEQ ID NO: 711, b. CDR-H2 comprising the amino acid sequence of SEQ ID NO: 1253, c. CDR-H3 comprising the amino acid sequence of SEQ ID NO: 1795, d. CDR-L1 comprising the amino acid sequence of SEQ ID NO: 982, e. CDR-L2 comprising the amino acid sequence of SEQ ID NO: 1524, and f. CDR-L3 comprising the amino acid sequence of SEQ ID NO: 2066.

[2182] In one aspect, the present disclosure provides an antibody or antigen-binding fragment thereof comprising a CDR-H3 comprising the amino acid sequence of SEQ ID NO: 1795, and a CDR-L3 comprising the amino acid sequence of SEQ ID NO: 2066.

[2183] In one aspect, the present disclosure provides an antibody or antigen-binding fragment thereof comprising at least one, at least two, or all three VH CDR sequences selected from: a. CDR-H1 comprising the amino acid sequence of SEQ ID NO: 711, b. CDR-H2 comprising the amino acid sequence of SEQ ID NO: 1253, c. CDR-H3 comprising the amino acid sequence of SEQ ID NO: 1795, and a VL comprising the amino acid sequence of SEQ ID NO: 440.

[2184] In one aspect, the present disclosure provides an antibody or antigen-binding fragment thereof comprising at least one, at least two, or all three VL CDR sequences selected from: a. CDR-L1 comprising the amino acid sequence of SEQ ID NO: 982, b. CDR-L2 comprising the amino acid sequence of SEQ ID NO: 1524, c. CDR-L3 comprising the amino acid sequence of SEQ ID NO: 2066, and a VH comprising the amino acid sequence of SEQ ID NO: 169.

[2185] In one aspect, an antibody or antigen-binding fragment thereof is provided, wherein the antibody or antigen-binding fragment thereof comprises a heavy chain variable domain (VH) having at least 90%, 91%, 92%, 93%, 94%, 95%, 96%, 97%, 98%, 99%, or 100% sequence identity to the amino acid sequence SEQ ID NO: 169. In some embodiments, a VH sequence having at least 90%, 91%, 92%, 93%, 94%, 95%, 96%, 97%, 98%, or 99% identity contains substitutions (e.g., conservative substitutions), insertions, or deletions relative to the reference sequence, but an antibody or antigen-binding fragment thereof comprising that sequence retains the ability to bind to same antigen as of the parent (e.g., cancer associated antigen). In some embodiments, a total of 1 to 10 amino acids have been substituted, inserted and/or deleted in the amino acid sequence SEQ ID NO: 169. In some embodiments, substitutions, insertions, or deletions occur in regions outside the CDRs (e.g., in the FRs). Optionally, the antibody or antigen-binding fragment thereof comprises the VH sequence SEQ ID NO: 169, including one or more post-translational modifications of that sequence. In a particular embodiment, the VH comprises one, two or three CDRs selected from: a. CDR-H1, comprising the amino acid sequence SEQ ID NO: 711, b. CDR-H2, comprising the amino acid sequence SEQ ID NO: 1253, and c. CDR-H3, comprising the amino acid sequence SEQ ID NO: 1795.

[2186] In one aspect, an antibody or antigen-binding fragment thereof is provided, wherein the antibody or antigen-binding fragment thereof comprises a light chain variable domain (VL) having at least 90%, 91%, 92%, 93%, 94%, 95%, 96%, 97%, 98%, 99%, or 100% sequence identity to the amino acid sequence SEQ ID NO: 440. In some embodiments, a VL sequence having at least 90%, 91%, 92%, 93%, 94%, 95%, 96%, 97%, 98%, or 99% identity contains substitutions (e.g., conservative substitutions), insertions, or deletions relative to the reference sequence, but an antibody or antigen-binding fragment thereof comprising that sequence retains the ability to bind to same antigen as the parent (e.g., cancer associated antigen). In some embodiments, a total of 1 to 10 amino acids have been substituted, inserted and/or deleted in the amino acid sequence SEQ ID NO: 440. In some embodiments, the substitutions, insertions, or deletions occur in regions outside the CDRs (e.g., in the FRs). Optionally, the antibody or antigen-binding fragment thereof comprises the VL sequence SEQ ID NO: 440, including one or more post-translational modifications of that sequence. In a particular embodiment, the VL comprises one, two or three CDRs selected from: a. CDR-L1, comprising the amino acid sequence SEQ ID NO: 982, b. CDR-L2, comprising the amino acid sequence SEQ ID NO: 1524, and c. CDR-L3, comprising the amino acid sequence SEQ ID NO: 2066.

[2187] In one aspect, an antibody or antigen-binding fragment thereof is provided, wherein the antibody or antigen-binding fragment thereof comprises a VH as in any of the embodiments provided above, and a VL as in any of the embodiments provided above. In some embodiments, the antibody or antigen-binding fragment thereof comprises the VH amino acid sequence of SEQ ID NO: 169, and the VL amino acid sequence of SEQ ID NO: 440, optionally including post-translational modifications of those sequences. TMEL1015

[2188] In one aspect, the present disclosure provides an antibody or antigen-binding fragment thereof comprising at least one or both variable regions selected from: a. VH comprising the amino acid sequence of SEQ ID NO: 170 and b. VL comprising the amino acid sequence of SEQ ID NO: 441.

[2189] In one aspect, the present disclosure provides an antibody or antigen-binding fragment thereof comprising at least one, two, three, four, five, or six CDRs selected from: a. CDR-H1 comprising the amino acid sequence of SEQ ID NO: 712, b. CDR-H2 comprising the amino acid sequence of SEQ ID NO: 1254, c. CDR-H3 comprising the amino acid sequence of SEQ ID NO: 1796, d. CDR-L1 comprising the amino acid sequence of SEQ ID NO: 983, e. CDR-L2 comprising the amino acid sequence of SEQ ID NO: 1525, and f. CDR-L3 comprising the amino acid sequence of SEQ ID NO: 2067.

[2190] In one aspect, the present disclosure provides an antibody or antigen-binding fragment thereof comprising a CDR-H3 comprising the amino acid sequence of SEQ ID NO: 1796, and a CDR-L3 comprising the amino acid sequence of SEQ ID NO: 2067.

[2191] In one aspect, the present disclosure provides an antibody or antigen-binding fragment thereof comprising at least one, at least two, or all three VH CDR sequences selected from: a. CDR-H1 comprising the amino acid sequence of SEQ ID NO: 712, b. CDR-H2 comprising the amino acid sequence of SEQ ID NO: 1254, c. CDR-H3 comprising the amino acid sequence of SEQ ID NO: 1796, and a VL comprising the amino acid sequence of SEQ ID NO: 441.

[2192] In one aspect, the present disclosure provides an antibody or antigen-binding fragment thereof comprising at least one, at least two, or all three VL CDR sequences selected from: a. CDR-L1 comprising the amino acid sequence of SEQ ID NO: 983, b. CDR-L2 comprising the amino acid sequence of SEQ ID NO: 1525, c. CDR-L3 comprising the amino acid sequence of SEQ ID NO: 2067, and a VH comprising the amino acid sequence of SEQ ID NO: 170.

[2193] In one aspect, an antibody or antigen-binding fragment thereof is provided, wherein the antibody or antigen-binding fragment thereof comprises a heavy chain variable domain (VH) having at least 90%, 91%, 92%, 93%, 94%, 95%, 96%, 97%, 98%, 99%, or 100% sequence identity to the amino acid sequence SEQ ID NO: 170. In some embodiments, a VH sequence having at least 90%, 91%, 92%, 93%, 94%, 95%, 96%, 97%, 98%, or 99% identity contains substitutions (e.g., conservative substitutions), insertions, or deletions relative to the reference sequence, but an antibody or antigen-binding fragment thereof comprising that sequence retains the ability to bind to same antigen as of the parent (e.g., cancer associated antigen). In some embodiments, a total of 1 to 10 amino acids have been substituted, inserted and/or deleted in the amino acid sequence SEQ ID NO: 170. In some embodiments, substitutions, insertions, or deletions occur in regions outside the CDRs (e.g., in the FRs). Optionally, the antibody or antigen-binding fragment thereof comprises the VH sequence SEQ ID NO: 170, including one or more post-translational modifications of that sequence. In a particular embodiment, the VH comprises one, two or three CDRs selected from: a. CDR-H1, comprising the amino acid sequence SEQ ID NO: 712, b. CDR-H2, comprising the amino acid sequence SEQ ID NO: 1254, and c. CDR-H3, comprising the amino acid sequence SEQ ID NO: 1796.

[2194] In one aspect, an antibody or antigen-binding fragment thereof is provided, wherein the antibody or antigen-binding fragment thereof comprises a light chain variable domain (VL) having at least 90%, 91%, 92%, 93%, 94%, 95%, 96%, 97%, 98%, 99%, or 100% sequence identity to the amino acid sequence SEQ ID NO: 441. In some embodiments, a VL sequence having at least 90%, 91%, 92%, 93%, 94%, 95%, 96%, 97%, 98%, or 99% identity contains substitutions (e.g., conservative substitutions), insertions, or deletions relative to the reference sequence, but an antibody or antigen-binding fragment thereof comprising that sequence retains the ability to bind to same antigen as the parent (e.g., cancer associated antigen). In some embodiments, a total of 1 to 10 amino acids have been substituted, inserted and/or deleted in the amino acid sequence SEQ ID NO: 441. In some embodiments, the substitutions, insertions, or deletions occur in regions outside the CDRs (e.g., in the FRs). Optionally, the antibody or antigen-binding fragment thereof comprises the VL sequence SEQ ID NO: 441, including one or more post-translational modifications of that sequence. In a particular embodiment, the VL comprises one, two or three CDRs selected from: a. CDR-L1, comprising the amino acid sequence SEQ ID NO: 983, b. CDR-L2, comprising the amino acid sequence SEQ ID NO: 1525, and c. CDR-L3, comprising the amino acid sequence SEQ ID NO: 2067.

[2195] In one aspect, an antibody or antigen-binding fragment thereof is provided, wherein the antibody or antigen-binding fragment thereof comprises a VH as in any of the embodiments provided above, and a VL as in any of the embodiments provided above. In some embodiments, the antibody or antigen-binding fragment thereof comprises the VH amino acid sequence of SEQ ID NO: 170, and the VL amino acid sequence of SEQ ID NO: 441, optionally including post-translational modifications of those sequences. TMEL1016

[2196] In one aspect, the present disclosure provides an antibody or antigen-binding fragment thereof comprising at least one or both variable regions selected from: a. VH comprising the amino acid sequence of SEQ ID NO: 171 and b. VL comprising the amino acid sequence of SEQ ID NO: 442.

[2197] In one aspect, the present disclosure provides an antibody or antigen-binding fragment thereof comprising at least one, two, three, four, five, or six CDRs selected from: a. CDR-H1 comprising the amino acid sequence of SEQ ID NO: 713, b. CDR-H2 comprising the amino acid sequence of SEQ ID NO: 1255, c. CDR-H3 comprising the amino acid sequence of SEQ ID NO: 1797, d. CDR-L1 comprising the amino acid sequence of SEQ ID NO: 984, e. CDR-L2 comprising the amino acid sequence of SEQ ID NO: 1526, and f. CDR-L3 comprising the amino acid sequence of SEQ ID NO: 2068.

[2198] In one aspect, the present disclosure provides an antibody or antigen-binding fragment thereof comprising a CDR-H3 comprising the amino acid sequence of SEQ ID NO: 1797, and a CDR-L3 comprising the amino acid sequence of SEQ ID NO: 2068.

[2199] In one aspect, the present disclosure provides an antibody or antigen-binding fragment thereof comprising at least one, at least two, or all three VH CDR sequences selected from: a. CDR-H1 comprising the amino acid sequence of SEQ ID NO: 713, b. CDR-H2 comprising the amino acid sequence of SEQ ID NO: 1255, c. CDR-H3 comprising the amino acid sequence of SEQ ID NO: 1797, and a VL comprising the amino acid sequence of SEQ ID NO: 442.

[2200] In one aspect, the present disclosure provides an antibody or antigen-binding fragment thereof comprising at least one, at least two, or all three VL CDR sequences selected from: a. CDR-L1 comprising the amino acid sequence of SEQ ID NO: 984, b. CDR-L2 comprising the amino acid sequence of SEQ ID NO: 1526, c. CDR-L3 comprising the amino acid sequence of SEQ ID NO: 2068, and a VH comprising the amino acid sequence of SEQ ID NO: 171.

[2201] In one aspect, an antibody or antigen-binding fragment thereof is provided, wherein the antibody or antigen-binding fragment thereof comprises a heavy chain variable domain (VH) having at least 90%, 91%, 92%, 93%, 94%, 95%, 96%, 97%, 98%, 99%, or 100% sequence identity to the amino acid sequence SEQ ID NO: 171. In some embodiments, a VH sequence having at least 90%, 91%, 92%, 93%, 94%, 95%, 96%, 97%, 98%, or 99% identity contains substitutions (e.g., conservative substitutions), insertions, or deletions relative to the reference sequence, but an antibody or antigen-binding fragment thereof comprising that sequence retains the ability to bind to same antigen as of the parent (e.g., cancer associated antigen). In some embodiments, a total of 1 to 10 amino acids have been substituted, inserted and/or deleted in the amino acid sequence SEQ ID NO: 171. In some embodiments, substitutions, insertions, or deletions occur in regions outside the CDRs (e.g., in the FRs). Optionally, the antibody or antigen-binding fragment thereof comprises the VH sequence SEQ ID NO: 171, including one or more post-translational modifications of that sequence. In a particular embodiment, the VH comprises one, two or three CDRs selected from: a. CDR-H1, comprising the amino acid sequence SEQ ID NO: 713, b. CDR-H2, comprising the amino acid sequence SEQ ID NO: 1255, and c. CDR-H3, comprising the amino acid sequence SEQ ID NO: 1797.

[2202] In one aspect, an antibody or antigen-binding fragment thereof is provided, wherein the antibody or antigen-binding fragment thereof comprises a light chain variable domain (VL) having at least 90%, 91%, 92%, 93%, 94%, 95%, 96%, 97%, 98%, 99%, or 100% sequence identity to the amino acid sequence SEQ ID NO: 442. In some embodiments, a VL sequence having at least 90%, 91%, 92%, 93%, 94%, 95%, 96%, 97%, 98%, or 99% identity contains substitutions (e.g., conservative substitutions), insertions, or deletions relative to the reference sequence, but an antibody or antigen-binding fragment thereof comprising that sequence retains the ability to bind to same antigen as the parent (e.g., cancer associated antigen). In some embodiments, a total of 1 to 10 amino acids have been substituted, inserted and/or deleted in the amino acid sequence SEQ ID NO: 442. In some embodiments, the substitutions, insertions, or deletions occur in regions outside the CDRs (e.g., in the FRs). Optionally, the antibody or antigen-binding fragment thereof comprises the VL sequence SEQ ID NO: 442, including one or more post-translational modifications of that sequence. In a particular embodiment, the VL comprises one, two or three CDRs selected from: a. CDR-L1, comprising the amino acid sequence SEQ ID NO: 984, b. CDR-L2, comprising the amino acid sequence SEQ ID NO: 1526, and c. CDR-L3, comprising the amino acid sequence SEQ ID NO: 2068.

[2203] In one aspect, an antibody or antigen-binding fragment thereof is provided, wherein the antibody or antigen-binding fragment thereof comprises a VH as in any of the embodiments provided above, and a VL as in any of the embodiments provided above. In some embodiments, the antibody or antigen-binding fragment thereof comprises the VH amino acid sequence of SEQ ID NO: 171, and the VL amino acid sequence of SEQ ID NO: 442, optionally including post-translational modifications of those sequences.

### TMEL1017

[2204] In one aspect, the present disclosure provides an antibody or antigen-binding fragment thereof comprising at least one or both variable regions selected from: a. VH comprising the amino acid sequence of SEQ ID NO: 172 and b. VL comprising the amino acid sequence of SEQ ID NO: 443.

[2205] In one aspect, the present disclosure provides an antibody or antigen-binding fragment thereof comprising at least one, two, three, four, five, or six CDRs selected from: a. CDR-H1 comprising the amino acid sequence of SEQ ID NO: 714, b. CDR-H2 comprising the amino acid sequence of SEQ ID NO: 1256, c. CDR-H3 comprising the amino acid sequence of SEQ ID NO: 1798, d. CDR-L1 comprising the amino acid sequence of SEQ ID NO: 985, e. CDR-L2 comprising the amino acid sequence of SEQ ID NO: 1527, and f. CDR-L3 comprising the amino acid sequence of SEQ ID NO: 2069.

[2206] In one aspect, the present disclosure provides an antibody or antigen-binding fragment thereof comprising a CDR-H3 comprising the amino acid sequence of SEQ ID NO: 1798, and a CDR-L3 comprising the amino acid sequence of SEQ ID NO: 2069.

[2207] In one aspect, the present disclosure provides an antibody or antigen-binding fragment thereof comprising at least one, at least two, or all three VH CDR sequences selected from: a. CDR-H1 comprising the amino acid sequence of SEQ ID NO: 714, b. CDR-H2 comprising the amino acid sequence of SEQ ID NO: 1256, c. CDR-H3 comprising the amino acid sequence of SEQ ID NO: 1798, and a VL comprising the amino acid sequence of SEQ ID NO: 443.

[2208] In one aspect, the present disclosure provides an antibody or antigen-binding fragment thereof comprising at least one, at least two, or all three VL CDR sequences selected from: a. CDR-L1 comprising the amino acid sequence of SEQ ID NO: 985, b. CDR-L2 comprising the amino acid sequence of SEQ ID NO: 1527, c. CDR-L3 comprising the amino acid sequence of SEQ ID NO: 2069, and a VH comprising the amino acid sequence of SEQ ID NO: 172.

[2209] In one aspect, an antibody or antigen-binding fragment thereof is provided, wherein the antibody or antigen-binding fragment thereof comprises a heavy chain variable domain (VH) having at least 90%, 91%, 92%, 93%, 94%, 95%, 96%, 97%, 98%, 99%, or 100% sequence identity to the amino acid sequence SEQ ID NO: 172. In some embodiments, a VH sequence having at least 90%, 91%, 92%, 93%, 94%, 95%, 96%, 97%, 98%, or 99% identity contains substitutions (e.g., conservative substitutions), insertions, or deletions relative to the reference sequence, but an antibody or antigen-binding fragment thereof comprising that sequence retains the ability to bind to same antigen as of the parent (e.g., cancer associated antigen). In some embodiments, a total of 1 to 10 amino acids have been substituted, inserted and/or deleted in the amino acid sequence SEQ ID NO: 172. In some embodiments, substitutions, insertions, or deletions occur in regions outside the CDRs (e.g., in the FRs). Optionally, the antibody or antigen-binding fragment thereof comprises the VH sequence SEQ ID NO: 172, including one or more post-translational modifications of that sequence. In a particular embodiment, the VH comprises one, two or three CDRs selected from: a. CDR-H1, comprising the amino acid sequence SEQ ID NO: 714, b. CDR-H2, comprising the amino acid sequence SEQ ID NO: 1256, and c. CDR-H3, comprising the amino acid sequence SEQ ID NO: 1798.

[2210] In one aspect, an antibody or antigen-binding fragment thereof is provided, wherein the antibody or antigen-binding fragment thereof comprises a light chain variable domain (VL) having at least 90%, 91%, 92%, 93%, 94%, 95%, 96%, 97%, 98%, 99%, or 100% sequence identity to the amino acid sequence SEQ ID NO: 443. In some embodiments, a VL sequence having at least 90%, 91%, 92%, 93%, 94%, 95%, 96%, 97%, 98%, or 99% identity contains substitutions (e.g., conservative substitutions), insertions, or deletions relative to the reference sequence, but an antibody or antigen-binding fragment thereof comprising that sequence retains the ability to bind to same antigen as the parent (e.g., cancer associated antigen). In some embodiments, a total of 1 to 10 amino acids have been substituted, inserted and/or deleted in the amino acid sequence SEQ ID NO: 443. In some embodiments, the substitutions, insertions, or deletions occur in regions outside the CDRs (e.g., in the FRs). Optionally, the antibody or antigen-binding fragment thereof comprises the VL sequence SEQ ID NO: 443, including one or more post-translational modifications of that sequence. In a particular embodiment, the VL comprises one, two or three CDRs selected from: a. CDR-L1, comprising the amino acid sequence SEQ ID NO: 985, b. CDR-L2, comprising the amino acid sequence SEQ ID NO: 1527, and c. CDR-L3, comprising the amino acid sequence SEQ ID NO: 2069.

[2211] In one aspect, an antibody or antigen-binding fragment thereof is provided, wherein the antibody or antigen-binding fragment thereof comprises a VH as in any of the embodiments provided above, and a VL as in any of the embodiments provided above. In some embodiments, the antibody or antigen-binding fragment thereof comprises the VH amino acid sequence of SEQ ID NO: 172, and the VL amino acid sequence of SEQ ID NO: 443, optionally including post-translational modifications of those sequences.

### TMEL1018

[2212] In one aspect, the present disclosure provides an antibody or antigen-binding fragment thereof comprising at least one or both variable regions selected from: a. VH comprising the amino acid sequence of SEQ ID NO: 173 and b. VL comprising the amino acid sequence of SEQ ID NO: 444.

[2213] In one aspect, the present disclosure provides an antibody or antigen-binding fragment thereof comprising at least one, two, three, four, five, or six CDRs selected from: a. CDR-H1 comprising the amino acid sequence of SEQ ID NO: 715, b. CDR-H2 comprising the amino acid sequence of SEQ ID NO: 1257, c. CDR-H3 comprising the amino acid sequence of SEQ ID NO: 1799, d. CDR-L1 comprising the amino acid sequence of SEQ ID NO: 986, e. CDR-L2 comprising the amino acid sequence of SEQ ID NO: 1528, and f. CDR-L3 comprising the amino acid sequence of SEQ ID NO: 2070.

[2214] In one aspect, the present disclosure provides an antibody or antigen-binding fragment thereof comprising a CDR-H3 comprising the amino acid sequence of SEQ ID NO: 1799, and a CDR-L3 comprising the amino acid sequence of SEQ ID NO: 2070.

[2215] In one aspect, the present disclosure provides an antibody or antigen-binding fragment thereof comprising at least one, at least two, or all three VH CDR sequences selected from: a. CDR-H1 comprising the amino acid sequence of SEQ ID NO: 715, b. CDR-H2 comprising the amino acid sequence of SEQ ID NO: 1257, c. CDR-H3 comprising the amino acid sequence of SEQ ID NO: 1799, and a VL comprising the amino acid sequence of SEQ ID NO: 444.

[2216] In one aspect, the present disclosure provides an antibody or antigen-binding fragment thereof comprising at least one, at least two, or all three VL CDR sequences selected from: a. CDR-L1 comprising the amino acid sequence of SEQ ID NO: 986, b. CDR-L2 comprising the amino acid sequence of SEQ ID NO: 1528, c. CDR-L3 comprising the amino acid sequence of SEQ ID NO: 2070, and a VH comprising the amino acid sequence of SEQ ID NO: 173.

[2217] In one aspect, an antibody or antigen-binding fragment thereof is provided, wherein the antibody or antigen-binding fragment thereof comprises a heavy chain variable domain (VH) having at least 90%, 91%, 92%, 93%, 94%, 95%, 96%, 97%, 98%, 99%, or 100% sequence identity to the amino acid sequence SEQ ID NO: 173. In some embodiments, a VH sequence having at least 90%, 91%, 92%, 93%, 94%, 95%, 96%, 97%, 98%, or 99% identity contains substitutions (e.g., conservative substitutions), insertions, or deletions relative to the reference sequence, but an antibody or antigen-binding fragment thereof comprising that sequence retains the ability to bind to same antigen as of the parent (e.g., cancer associated antigen). In some embodiments, a total of 1 to 10 amino acids have been substituted, inserted and/or deleted in the amino acid sequence SEQ ID NO: 173. In some embodiments, substitutions, insertions, or deletions occur in regions outside the CDRs (e.g., in the FRs). Optionally, the antibody or antigen-binding fragment thereof comprises the VH sequence SEQ ID NO: 173, including one or more post-translational modifications of that sequence. In a particular embodiment, the VH comprises one, two or three CDRs selected from: a. CDR-H1, comprising the amino acid sequence SEQ ID NO: 715, b. CDR-H2, comprising the amino acid sequence SEQ ID NO: 1257, and c. CDR-H3, comprising the amino acid sequence SEQ ID NO: 1799.

[2218] In one aspect, an antibody or antigen-binding fragment thereof is provided, wherein the antibody or antigen-binding fragment thereof comprises a light chain variable domain (VL) having at least 90%, 91%, 92%, 93%, 94%, 95%, 96%, 97%, 98%, 99%, or 100% sequence identity to the amino acid sequence SEQ ID NO: 444. In some embodiments, a VL sequence having at least 90%, 91%, 92%, 93%, 94%, 95%, 96%, 97%, 98%, or 99% identity contains substitutions (e.g., conservative substitutions), insertions, or deletions relative to the reference sequence, but an antibody or antigen-binding fragment thereof comprising that sequence retains the ability to bind to same antigen as the parent (e.g., cancer associated antigen). In some embodiments, a total of 1 to 10 amino acids have been substituted, inserted and/or deleted in the amino acid sequence SEQ ID NO: 444. In some embodiments, the substitutions, insertions, or deletions occur in regions outside the CDRs (e.g., in the FRs). Optionally, the antibody or antigen-binding fragment thereof comprises the VL sequence SEQ ID NO: 444, including one or more post-translational modifications of that sequence. In a particular embodiment, the VL comprises one, two or three CDRs selected from: a. CDR-L1, comprising the amino acid sequence SEQ ID NO: 986, b. CDR-L2, comprising the amino acid sequence SEQ ID NO: 1528, and c. CDR-L3, comprising the amino acid sequence SEQ ID NO: 2070.

[2219] In one aspect, an antibody or antigen-binding fragment thereof is provided, wherein the antibody or antigen-binding fragment thereof comprises a VH as in any of the embodiments provided above, and a VL as in any of the embodiments provided above. In some embodiments, the antibody or antigen-binding fragment thereof comprises the VH amino acid sequence of SEQ ID NO: 173, and the VL amino acid sequence of SEQ ID NO: 444, optionally including post-translational modifications of those sequences.

### TMEL1019

[2220] In one aspect, the present disclosure provides an antibody or antigen-binding fragment thereof comprising at least one or both variable regions selected from: a. VH comprising the amino acid sequence of SEQ ID NO: 174 and b. VL comprising the amino acid sequence of SEQ ID NO: 445.

[2221] In one aspect, the present disclosure provides an antibody or antigen-binding fragment thereof comprising at least one, two, three, four, five, or six CDRs selected from: a. CDR-H1 comprising the amino acid sequence of SEQ ID NO: 716, b. CDR-H2 comprising the amino acid sequence of SEQ ID NO: 1258, c. CDR-H3 comprising the amino acid sequence of SEQ ID NO: 1800, d. CDR-L1 comprising the amino acid sequence of SEQ ID NO: 987, e. CDR-L2 comprising the amino acid sequence of SEQ ID NO: 1529, and f. CDR-L3 comprising the amino acid sequence of SEQ ID NO: 2071.

[2222] In one aspect, the present disclosure provides an antibody or antigen-binding fragment thereof comprising a CDR-H3 comprising the amino acid sequence of SEQ ID NO: 1800, and a CDR-L3 comprising the amino acid sequence of SEQ ID NO: 2071.

[2223] In one aspect, the present disclosure provides an antibody or antigen-binding fragment thereof comprising at least one, at least two, or all three VH CDR sequences selected from: a. CDR-H1 comprising the amino acid sequence of SEQ ID NO: 716, b. CDR-H2 comprising the amino acid sequence of SEQ ID NO: 1258, c. CDR-H3 comprising the amino acid sequence of SEQ ID NO: 1800, and a VL comprising the amino acid sequence of SEQ ID NO: 445.

[2224] In one aspect, the present disclosure provides an antibody or antigen-binding fragment thereof comprising at least one, at least two, or all three VL CDR sequences selected from: a. CDR-L1 comprising the amino acid sequence of SEQ ID NO: 987, b. CDR-L2 comprising the amino acid sequence of SEQ ID NO: 1529, c. CDR-L3 comprising the amino acid sequence of SEQ ID NO: 2071, and a VH comprising the amino acid sequence of SEQ ID NO: 174.

[2225] In one aspect, an antibody or antigen-binding fragment thereof is provided, wherein the antibody or antigen-binding fragment thereof comprises a heavy chain variable domain (VH) having at least 90%, 91%, 92%, 93%, 94%, 95%, 96%, 97%, 98%, 99%, or 100% sequence identity to the amino acid sequence SEQ ID NO: 174. In some embodiments, a VH sequence having at least 90%, 91%, 92%, 93%, 94%, 95%, 96%, 97%, 98%, or 99% identity contains substitutions (e.g., conservative substitutions), insertions, or deletions relative to the reference sequence, but an antibody or antigen-binding fragment thereof comprising that sequence retains the ability to bind to same antigen as of the parent (e.g., cancer associated antigen). In some embodiments, a total of 1 to 10 amino acids have been substituted, inserted and/or deleted in the amino acid sequence SEQ ID NO: 174. In some embodiments, substitutions, insertions, or deletions occur in regions outside the CDRs (e.g., in the FRs). Optionally, the antibody or antigen-binding fragment thereof comprises the VH sequence SEQ ID NO: 174, including one or more post-translational modifications of that sequence. In a particular embodiment, the VH comprises one, two or three CDRs selected from: a. CDR-H1, comprising the amino acid sequence SEQ ID NO: 716, b. CDR-H2, comprising the amino acid sequence SEQ ID NO: 1258, and c. CDR-H3, comprising the amino acid sequence SEQ ID NO: 1800.

[2226] In one aspect, an antibody or antigen-binding fragment thereof is provided, wherein the antibody or antigen-binding fragment thereof comprises a light chain variable domain (VL) having at least 90%, 91%, 92%, 93%, 94%, 95%, 96%, 97%, 98%, 99%, or 100% sequence identity to the amino acid sequence SEQ ID NO: 445. In some embodiments, a VL sequence having at least 90%, 91%, 92%, 93%, 94%, 95%, 96%, 97%, 98%, or 99% identity contains substitutions (e.g., conservative substitutions), insertions, or deletions relative to the reference sequence, but an antibody or antigen-binding fragment thereof comprising that sequence retains the ability to bind to same antigen as the parent (e.g., cancer associated antigen). In some embodiments, a total of 1 to 10 amino acids have been substituted, inserted and/or deleted in the amino acid sequence SEQ ID NO: 445. In some embodiments, the substitutions, insertions, or deletions occur in regions outside the CDRs (e.g., in the FRs). Optionally, the antibody or antigen-binding fragment thereof comprises the VL sequence SEQ ID NO: 445, including one or more post-translational modifications of that sequence. In a particular embodiment, the VL comprises one, two or three CDRs selected from: a. CDR-L1, comprising the amino acid sequence SEQ ID NO: 987, b. CDR-L2, comprising the amino acid sequence SEQ ID NO: 1529, and c. CDR-L3, comprising the amino acid sequence SEQ ID NO: 2071.

[2227] In one aspect, an antibody or antigen-binding fragment thereof is provided, wherein the antibody or antigen-binding fragment thereof comprises a VH as in any of the embodiments provided above, and a VL as in any of the embodiments provided above. In some embodiments, the antibody or antigen-binding fragment thereof comprises the VH amino acid sequence of SEQ ID NO: 174, and the VL amino acid sequence of SEQ ID NO: 445, optionally including post-translational modifications of those sequences.

### TMEL1020

[2228] In one aspect, the present disclosure provides an antibody or antigen-binding fragment thereof comprising at least one or both variable regions selected from: a. VH comprising the amino acid sequence of SEQ ID NO: 175 and b. VL comprising the amino acid sequence of SEQ ID NO: 446.

[2229] In one aspect, the present disclosure provides an antibody or antigen-binding fragment thereof comprising at least one, two, three, four, five, or six CDRs selected from: a. CDR-H1 comprising the amino acid sequence of SEQ ID NO: 717, b. CDR-H2 comprising the amino acid sequence of SEQ ID NO: 1259, c. CDR-H3 comprising the amino acid sequence of SEQ ID NO: 1801, d. CDR-L1 comprising the amino acid sequence of SEQ ID NO: 988, e. CDR-L2 comprising the amino acid sequence of SEQ ID NO: 1530, and f. CDR-L3 comprising the amino acid sequence of SEQ ID NO: 2072.

[2230] In one aspect, the present disclosure provides an antibody or antigen-binding fragment thereof comprising a CDR-H3 comprising the amino acid sequence of SEQ ID NO: 1801, and a CDR-L3 comprising the amino acid sequence of SEQ ID NO: 2072.

[2231] In one aspect, the present disclosure provides an antibody or antigen-binding fragment thereof comprising at least one, at least two, or all three VH CDR sequences selected from: a. CDR-H1 comprising the amino acid sequence of SEQ ID NO: 717, b. CDR-H2 comprising the amino acid sequence of SEQ ID NO: 1259, c. CDR-H3 comprising the amino acid sequence of SEQ ID NO: 1801, and a VL comprising the amino acid sequence of SEQ ID NO: 446.

[2232] In one aspect, the present disclosure provides an antibody or antigen-binding fragment thereof comprising at least one, at least two, or all three VL CDR sequences selected from: a. CDR-L1 comprising the amino acid sequence of SEQ ID NO: 988, b. CDR-L2 comprising the amino acid sequence of SEQ ID NO: 1530, c. CDR-L3 comprising the amino acid sequence of SEQ ID NO: 2072, and a VH comprising the amino acid sequence of SEQ ID NO: 175.

[2233] In one aspect, an antibody or antigen-binding fragment thereof is provided, wherein the antibody or antigen-binding fragment thereof comprises a heavy chain variable domain (VH) having at least 90%, 91%, 92%, 93%, 94%, 95%, 96%, 97%, 98%, 99%, or 100% sequence identity to the amino acid sequence SEQ ID NO: 175. In some embodiments, a VH sequence having at least 90%, 91%, 92%, 93%, 94%, 95%, 96%, 97%, 98%, or 99% identity contains substitutions (e.g., conservative substitutions), insertions, or deletions relative to the reference sequence, but an antibody or antigen-binding fragment thereof comprising that sequence retains the ability to bind to same antigen as of the parent (e.g., cancer associated antigen). In some embodiments, a total of 1 to 10 amino acids have been substituted, inserted and/or deleted in the amino acid sequence SEQ ID NO: 175. In some embodiments, substitutions, insertions, or deletions occur in regions outside the CDRs (e.g., in the FRs). Optionally, the antibody or antigen-binding fragment thereof comprises the VH sequence SEQ ID NO: 175, including one or more post-translational modifications of that sequence. In a particular embodiment, the VH comprises one, two or three CDRs selected from: a. CDR-H1, comprising the amino acid sequence SEQ ID NO: 717, b. CDR-H2, comprising the amino acid sequence SEQ ID NO: 1259, and c. CDR-H3, comprising the amino acid sequence SEQ ID NO: 1801.

[2234] In one aspect, an antibody or antigen-binding fragment thereof is provided, wherein the antibody or antigen-binding fragment thereof comprises a light chain variable domain (VL) having at least 90%, 91%, 92%, 93%, 94%, 95%, 96%, 97%, 98%, 99%, or 100% sequence identity to the amino acid sequence SEQ ID NO: 446. In some embodiments, a VL sequence having at least 90%, 91%, 92%, 93%, 94%, 95%, 96%, 97%, 98%, or 99% identity contains substitutions (e.g., conservative substitutions), insertions, or deletions relative to the reference sequence, but an antibody or antigen-binding fragment thereof comprising that sequence retains the ability to bind to same antigen as the parent (e.g., cancer associated antigen). In some embodiments, a total of 1 to 10 amino acids have been substituted, inserted and/or deleted in the amino acid sequence SEQ ID NO: 446. In some embodiments, the substitutions, insertions, or deletions occur in regions outside the CDRs (e.g., in the FRs). Optionally, the antibody or antigen-binding fragment thereof comprises the VL sequence SEQ ID NO: 446, including one or more post-translational modifications of that sequence. In a particular embodiment, the VL comprises one, two or three CDRs selected from: a. CDR-L1, comprising the amino acid sequence SEQ ID NO: 988, b. CDR-L2, comprising the amino acid sequence SEQ ID NO: 1530, and c. CDR-L3, comprising the amino acid sequence SEQ ID NO: 2072.

[2235] In one aspect, an antibody or antigen-binding fragment thereof is provided, wherein the antibody or antigen-binding fragment thereof comprises a VH as in any of the embodiments provided above, and a VL as in any of the embodiments provided above. In some embodiments, the antibody or antigen-binding fragment thereof comprises the VH amino acid sequence of SEQ ID NO: 175, and the VL amino acid sequence of SEQ ID NO: 446, optionally including post-translational modifications of those sequences.

### TMEL1021

[2236] In one aspect, the present disclosure provides an antibody or antigen-binding fragment thereof comprising at least one or both variable regions selected from: a. VH comprising the amino acid sequence of SEQ ID NO: 176 and b. VL comprising the amino acid sequence of SEQ ID NO: 447.

[2237] In one aspect, the present disclosure provides an antibody or antigen-binding fragment thereof comprising at least one, two, three, four, five, or six CDRs selected from: a. CDR-H1 comprising the amino acid sequence of SEQ ID NO: 718, b. CDR-H2 comprising the amino acid sequence of SEQ ID NO: 1260, c. CDR-H3 comprising the amino acid sequence of SEQ ID NO: 1802, d. CDR-L1 comprising the amino acid sequence of SEQ ID NO: 989, e. CDR-L2 comprising the amino acid sequence of SEQ ID NO: 1531, and f. CDR-L3 comprising the amino acid sequence of SEQ ID NO: 2073.

[2238] In one aspect, the present disclosure provides an antibody or antigen-binding fragment thereof comprising a CDR-H3 comprising the amino acid sequence of SEQ ID NO: 1802, and a CDR-L3 comprising the amino acid sequence of SEQ ID NO: 2073.

[2239] In one aspect, the present disclosure provides an antibody or antigen-binding fragment thereof comprising at least one, at least two, or all three VH CDR sequences selected from: a. CDR-H1 comprising the amino acid sequence of SEQ ID NO: 718, b. CDR-H2 comprising the amino acid sequence of SEQ ID NO: 1260, c. CDR-H3 comprising the amino acid sequence of SEQ ID NO: 1802, and a VL comprising the amino acid sequence of SEQ ID NO: 447.

[2240] In one aspect, the present disclosure provides an antibody or antigen-binding fragment thereof comprising at least one, at least two, or all three VL CDR sequences selected from: a. CDR-L1 comprising the amino acid sequence of SEQ ID NO: 989, b. CDR-L2 comprising the amino acid sequence of SEQ ID NO: 1531, c. CDR-L3 comprising the amino acid sequence of SEQ ID NO: 2073, and a VH comprising the amino acid sequence of SEQ ID NO: 176.

[2241] In one aspect, an antibody or antigen-binding fragment thereof is provided, wherein the antibody or antigen-binding fragment thereof comprises a heavy chain variable domain (VH) having at least 90%, 91%, 92%, 93%, 94%, 95%, 96%, 97%, 98%, 99%, or 100% sequence identity to the amino acid sequence SEQ ID NO: 176. In some embodiments, a VH sequence having at least 90%, 91%, 92%, 93%, 94%, 95%, 96%, 97%, 98%, or 99% identity contains substitutions (e.g., conservative substitutions), insertions, or deletions relative to the reference sequence, but an antibody or antigen-binding fragment thereof comprising that sequence retains the ability to bind to same antigen as of the parent (e.g., cancer associated antigen). In some embodiments, a total of 1 to 10 amino acids have been substituted, inserted and/or deleted in the amino acid sequence SEQ ID NO: 176. In some embodiments, substitutions, insertions, or deletions occur in regions outside the CDRs (e.g., in the FRs). Optionally, the antibody or antigen-binding fragment thereof comprises the VH sequence SEQ ID NO: 176, including one or more post-translational modifications of that sequence. In a particular embodiment, the VH comprises one, two or three CDRs selected from: a. CDR-H1, comprising the amino acid sequence SEQ ID NO: 718, b. CDR-H2, comprising the amino acid sequence SEQ ID NO: 1260, and c. CDR-H3, comprising the amino acid sequence SEQ ID NO: 1802.

[2242] In one aspect, an antibody or antigen-binding fragment thereof is provided, wherein the antibody or antigen-binding fragment thereof comprises a light chain variable domain (VL) having at least 90%, 91%, 92%, 93%, 94%, 95%, 96%, 97%, 98%, 99%, or 100% sequence identity to the amino acid sequence SEQ ID NO: 447. In some embodiments, a VL sequence having at least 90%, 91%, 92%, 93%, 94%, 95%, 96%, 97%, 98%, or 99% identity contains substitutions (e.g., conservative substitutions), insertions, or deletions relative to the reference sequence, but an antibody or antigen-binding fragment thereof comprising that sequence retains the ability to bind to same antigen as the parent (e.g., cancer associated antigen). In some embodiments, a total of 1 to 10 amino acids have been substituted, inserted and/or deleted in the amino acid sequence SEQ ID NO: 447. In some embodiments, the substitutions, insertions, or deletions occur in regions outside the CDRs (e.g., in the FRs). Optionally, the antibody or antigen-binding fragment thereof comprises the VL sequence SEQ ID NO: 447, including one or more post-translational modifications of that sequence. In a particular embodiment, the VL comprises one, two or three CDRs selected from: a. CDR-L1, comprising the amino acid sequence SEQ ID NO: 989, b. CDR-L2, comprising the amino acid sequence SEQ ID NO: 1531, and c. CDR-L3, comprising the amino acid sequence SEQ ID NO: 2073.

[2243] In one aspect, an antibody or antigen-binding fragment thereof is provided, wherein the antibody or antigen-binding fragment thereof comprises a VH as in any of the embodiments provided above, and a VL as in any of the embodiments provided above. In some embodiments, the antibody or antigen-binding fragment thereof comprises the VH amino acid sequence of SEQ ID NO: 176, and the VL amino acid sequence of SEQ ID NO: 447, optionally including post-translational modifications of those sequences.

### TMEL1022

[2244] In one aspect, the present disclosure provides an antibody or antigen-binding fragment thereof comprising at least one or both variable regions selected from: a. VH comprising the amino acid sequence of SEQ ID NO: 177 and b. VL comprising the amino acid sequence of SEQ ID NO: 448.

[2245] In one aspect, the present disclosure provides an antibody or antigen-binding fragment thereof comprising at least one, two, three, four, five, or six CDRs selected from: a. CDR-H1 comprising the amino acid sequence of SEQ ID NO: 719, b. CDR-H2 comprising the amino acid sequence of SEQ ID NO: 1261, c. CDR-H3 comprising the amino acid sequence of SEQ ID NO: 1803, d. CDR-L1 comprising the amino acid sequence of SEQ ID NO: 990, e. CDR-L2 comprising the amino acid sequence of SEQ ID NO: 1532, and f. CDR-L3 comprising the amino acid sequence of SEQ ID NO: 2074.

[2246] In one aspect, the present disclosure provides an antibody or antigen-binding fragment thereof comprising a CDR-H3 comprising the amino acid sequence of SEQ ID NO: 1803, and a CDR-L3 comprising the amino acid sequence of SEQ ID NO: 2074.

[2247] In one aspect, the present disclosure provides an antibody or antigen-binding fragment thereof comprising at least one, at least two, or all three VH CDR sequences selected from: a. CDR-H1 comprising the amino acid sequence of SEQ ID NO: 719, b. CDR-H2 comprising the amino acid sequence of SEQ ID NO: 1261, c. CDR-H3 comprising the amino acid sequence of SEQ ID NO: 1803, and a VL comprising the amino acid sequence of SEQ ID NO: 448.

[2248] In one aspect, the present disclosure provides an antibody or antigen-binding fragment thereof comprising at least one, at least two, or all three VL CDR sequences selected from: a. CDR-L1 comprising the amino acid sequence of SEQ ID NO: 990, b. CDR-L2 comprising the amino acid sequence of SEQ ID NO: 1532, c. CDR-L3 comprising the amino acid sequence of SEQ ID NO: 2074, and a VH comprising the amino acid sequence of SEQ ID NO: 177.

[2249] In one aspect, an antibody or antigen-binding fragment thereof is provided, wherein the antibody or antigen-binding fragment thereof comprises a heavy chain variable domain (VH) having at least 90%, 91%, 92%, 93%, 94%, 95%, 96%, 97%, 98%, 99%, or 100% sequence identity to the amino acid sequence SEQ ID NO: 177. In some embodiments, a VH sequence having at least 90%, 91%, 92%, 93%, 94%, 95%, 96%, 97%, 98%, or 99% identity contains substitutions (e.g., conservative substitutions), insertions, or deletions relative to the reference sequence, but an antibody or antigen-binding fragment thereof comprising that sequence retains the ability to bind to same antigen as of the parent (e.g., cancer associated antigen). In some embodiments, a total of 1 to 10 amino acids have been substituted, inserted and/or deleted in the amino acid sequence SEQ ID NO: 177. In some embodiments, substitutions, insertions, or deletions occur in regions outside the CDRs (e.g., in the FRs). Optionally, the antibody or antigen-binding fragment thereof comprises the VH sequence SEQ ID NO: 177, including one or more post-translational modifications of that sequence. In a particular embodiment, the VH comprises one, two or three CDRs selected from: a. CDR-H1, comprising the amino acid sequence SEQ ID NO: 719, b. CDR-H2, comprising the amino acid sequence SEQ ID NO: 1261, and c. CDR-H3, comprising the amino acid sequence SEQ ID NO: 1803.

[2250] In one aspect, an antibody or antigen-binding fragment thereof is provided, wherein the antibody or antigen-binding fragment thereof comprises a light chain variable domain (VL) having at least 90%, 91%, 92%, 93%, 94%, 95%, 96%, 97%, 98%, 99%, or 100% sequence identity to the amino acid sequence SEQ ID NO: 448. In some embodiments, a VL sequence having at least 90%, 91%, 92%, 93%, 94%, 95%, 96%, 97%, 98%, or 99% identity contains substitutions (e.g., conservative substitutions), insertions, or deletions relative to the reference sequence, but an antibody or antigen-binding fragment thereof comprising that sequence retains the ability to bind to same antigen as the parent (e.g., cancer associated antigen). In some embodiments, a total of 1 to 10 amino acids have been substituted, inserted and/or deleted in the amino acid sequence SEQ ID NO: 448. In some embodiments, the substitutions, insertions, or deletions occur in regions outside the CDRs (e.g., in the FRs). Optionally, the antibody or antigen-binding fragment thereof comprises the VL sequence SEQ ID NO: 448, including one or more post-translational modifications of that sequence. In a particular embodiment, the VL comprises one, two or three CDRs selected from: a. CDR-L1, comprising the amino acid sequence SEQ ID NO: 990, b. CDR-L2, comprising the amino acid sequence SEQ ID NO: 1532, and c. CDR-L3, comprising the amino acid sequence SEQ ID NO: 2074.

[2251] In one aspect, an antibody or antigen-binding fragment thereof is provided, wherein the antibody or antigen-binding fragment thereof comprises a VH as in any of the embodiments provided above, and a VL as in any of the embodiments provided above. In some embodiments, the antibody or antigen-binding fragment thereof comprises the VH amino acid sequence of SEQ ID NO: 177, and the VL amino acid sequence of SEQ ID NO: 448, optionally including post-translational modifications of those sequences.

### TMEL1023

[2252] In one aspect, the present disclosure provides an antibody or antigen-binding fragment thereof comprising at least one or both variable regions selected from: a. VH comprising the amino acid sequence of SEQ ID NO: 178 and b. VL comprising the amino acid sequence of SEQ ID NO: 449.

[2253] In one aspect, the present disclosure provides an antibody or antigen-binding fragment thereof comprising at least one, two, three, four, five, or six CDRs selected from: a. CDR-H1 comprising the amino acid sequence of SEQ ID NO: 720, b CDR-H2 comprising the amino acid sequence of SEQ ID NO: 1262, c. CDR-H3 comprising the amino acid sequence of SEQ ID NO: 1804, d. CDR-L1 comprising the amino acid sequence of SEQ ID NO: 991, e. CDR-L2 comprising the amino acid sequence of SEQ ID NO: 1533, and f. CDR-L3 comprising the amino acid sequence of SEQ ID NO: 2075.

[2254] In one aspect, the present disclosure provides an antibody or antigen-binding fragment thereof comprising a CDR-H3 comprising the amino acid sequence of SEQ ID NO: 1804, and a CDR-L3 comprising the amino acid sequence of SEQ ID NO: 2075.

[2255] In one aspect, the present disclosure provides an antibody or antigen-binding fragment thereof comprising at least one, at least two, or all three VH CDR sequences selected from: a. CDR-H1 comprising the amino acid sequence of SEQ ID NO: 720, b. CDR-H2 comprising the amino acid sequence of SEQ ID NO: 1262, c. CDR-H3 comprising the amino acid sequence of SEQ ID NO: 1804, and a VL comprising the amino acid sequence of SEQ ID NO: 449.

[2256] In one aspect, the present disclosure provides an antibody or antigen-binding fragment thereof comprising at least one, at least two, or all three VL CDR sequences selected from: a. CDR-L1 comprising the amino acid sequence of SEQ ID NO: 991, b. CDR-L2 comprising the amino acid sequence of SEQ ID NO: 1533, c. CDR-L3 comprising the amino acid sequence of SEQ ID NO: 2075, and a VH comprising the amino acid sequence of SEQ ID NO: 178.

[2257] In one aspect, an antibody or antigen-binding fragment thereof is provided, wherein the antibody or antigen-binding fragment thereof comprises a heavy chain variable domain (VH) having at least 90%, 91%, 92%, 93%, 94%, 95%, 96%, 97%, 98%, 99%, or 100% sequence identity to the amino acid sequence SEQ ID NO: 178. In some embodiments, a VH sequence having at least 90%, 91%, 92%, 93%, 94%, 95%, 96%, 97%, 98%, or 99% identity contains substitutions (e.g., conservative substitutions), insertions, or deletions relative to the reference sequence, but an antibody or antigen-binding fragment thereof comprising that sequence retains the ability to bind to same antigen as of the parent (e.g., cancer associated antigen). In some embodiments, a total of 1 to 10 amino acids have been substituted, inserted and/or deleted in the amino acid sequence SEQ ID NO: 178. In some embodiments, substitutions, insertions, or deletions occur in regions outside the CDRs (e.g., in the FRs). Optionally, the antibody or antigen-binding fragment thereof comprises the VH sequence SEQ ID NO: 178, including one or more post-translational modifications of that sequence. In a particular embodiment, the VH comprises one, two or three CDRs selected from: a. CDR-H1, comprising the amino acid sequence SEQ ID NO: 720, b. CDR-H2, comprising the amino acid sequence SEQ ID NO: 1262, and c. CDR-H3, comprising the amino acid sequence SEQ ID NO: 1804.

[2258] In one aspect, an antibody or antigen-binding fragment thereof is provided, wherein the antibody or antigen-binding fragment thereof comprises a light chain variable domain (VL) having at least 90%, 91%, 92%, 93%, 94%, 95%, 96%, 97%, 98%, 99%, or 100% sequence identity to the amino acid sequence SEQ ID NO: 449. In some embodiments, a VL sequence having at least 90%, 91%, 92%, 93%, 94%, 95%, 96%, 97%, 98%, or 99% identity contains substitutions (e.g., conservative substitutions), insertions, or deletions relative to the reference sequence, but an antibody or antigen-binding fragment thereof comprising that sequence retains the ability to bind to same antigen as the parent (e.g., cancer associated antigen). In some embodiments, a total of 1 to 10 amino acids have been substituted, inserted and/or deleted in the amino acid sequence SEQ ID NO: 449. In some embodiments, the substitutions, insertions, or deletions occur in regions outside the CDRs (e.g., in the FRs). Optionally, the antibody or antigen-binding fragment thereof comprises the VL sequence SEQ ID NO: 449, including one or more post-translational modifications of that sequence. In a particular embodiment, the VL comprises one, two or three CDRs selected from: a. CDR-L1, comprising the amino acid sequence SEQ ID NO: 991, b. CDR-L2, comprising the amino acid sequence SEQ ID NO: 1533, and c. CDR-L3, comprising the amino acid sequence SEQ ID NO: 2075.

[2259] In one aspect, an antibody or antigen-binding fragment thereof is provided, wherein the antibody or antigen-binding fragment thereof comprises a VH as in any of the embodiments provided above, and a VL as in any of the embodiments provided above. In some embodiments, the antibody or antigen-binding fragment thereof comprises the VH amino acid sequence of SEQ ID NO: 178, and the VL amino acid sequence of SEQ ID NO: 449, optionally including post-translational modifications of those sequences.

### TMEL1024

[2260] In one aspect, the present disclosure provides an antibody or antigen-binding fragment thereof comprising at least one or both variable regions selected from: a. VH comprising the amino acid sequence of SEQ ID NO: 179 and b. VL comprising the amino acid sequence of SEQ ID NO: 450.

[2261] In one aspect, the present disclosure provides an antibody or antigen-binding fragment thereof comprising at least one, two, three, four, five, or six CDRs selected from: a. CDR-H1 comprising the amino acid sequence of SEQ ID NO: 721, b. CDR-H2 comprising the amino acid sequence of SEQ ID NO: 1263, c. CDR-H3 comprising the amino acid sequence of SEQ ID NO: 1805, d. CDR-L1 comprising the amino acid sequence of SEQ ID NO: 992, e. CDR-L2 comprising the amino acid sequence of SEQ ID NO: 1534, and f. CDR-L3 comprising the amino acid sequence of SEQ ID NO: 2076.

[2262] In one aspect, the present disclosure provides an antibody or antigen-binding fragment thereof comprising a CDR-H3 comprising the amino acid sequence of SEQ ID NO: 1805, and a CDR-L3 comprising the amino acid sequence of SEQ ID NO: 2076.

[2263] In one aspect, the present disclosure provides an antibody or antigen-binding fragment thereof comprising at least one, at least two, or all three VH CDR sequences selected from: a. CDR-H1 comprising the amino acid sequence of SEQ ID NO: 721, b. CDR-H2 comprising the amino acid sequence of SEQ ID NO: 1263, c. CDR-H3 comprising the amino acid sequence of SEQ ID NO: 1805, and a VL comprising the amino acid sequence of SEQ ID NO: 450.

[2264] In one aspect, the present disclosure provides an antibody or antigen-binding fragment thereof comprising at least one, at least two, or all three VL CDR sequences selected from: a. CDR-L1 comprising the amino acid sequence of SEQ ID NO: 992, b. CDR-L2 comprising the amino acid sequence of SEQ ID NO: 1534, c. CDR-L3 comprising the amino acid sequence of SEQ ID NO: 2076, and a VH comprising the amino acid sequence of SEQ ID NO: 179.

[2265] In one aspect, an antibody or antigen-binding fragment thereof is provided, wherein the antibody or antigen-binding fragment thereof comprises a heavy chain variable domain (VH) having at least 90%, 91%, 92%, 93%, 94%, 95%, 96%, 97%, 98%, 99%, or 100% sequence identity to the amino acid sequence SEQ ID NO: 179. In some embodiments, a VH sequence having at least 90%, 91%, 92%, 93%, 94%, 95%, 96%, 97%, 98%, or 99% identity contains substitutions (e.g., conservative substitutions), insertions, or deletions relative to the reference sequence, but an antibody or antigen-binding fragment thereof comprising that sequence retains the ability to bind to same antigen as of the parent (e.g., cancer associated antigen). In some embodiments, a total of 1 to 10 amino acids have been substituted, inserted and/or deleted in the amino acid sequence SEQ ID NO: 179. In some embodiments, substitutions, insertions, or deletions occur in regions outside the CDRs (e.g., in the FRs). Optionally, the antibody or antigen-binding fragment thereof comprises the VH sequence SEQ ID NO: 179, including one or more post-translational modifications of that sequence. In a particular embodiment, the VH comprises one, two or three CDRs selected from: a. CDR-H1, comprising the amino acid sequence SEQ ID NO: 721, b. CDR-H2, comprising the amino acid sequence SEQ ID NO: 1263, and c. CDR-H3, comprising the amino acid sequence SEQ ID NO: 1805.

[2266] In one aspect, an antibody or antigen-binding fragment thereof is provided, wherein the antibody or antigen-binding fragment thereof comprises a light chain variable domain (VL) having at least 90%, 91%, 92%, 93%, 94%, 95%, 96%, 97%, 98%, 99%, or 100% sequence identity to the amino acid sequence SEQ ID NO: 450. In some embodiments, a VL sequence having at least 90%, 91%, 92%, 93%, 94%, 95%, 96%, 97%, 98%, or 99% identity contains substitutions (e.g., conservative substitutions), insertions, or deletions relative to the reference sequence, but an antibody or antigen-binding fragment thereof comprising that sequence retains the ability to bind to same antigen as the parent (e.g., cancer associated antigen). In some embodiments, a total of 1 to 10 amino acids have been substituted, inserted and/or deleted in the amino acid sequence SEQ ID NO: 450. In some embodiments, the substitutions, insertions, or deletions occur in regions outside the CDRs (e.g., in the FRs). Optionally, the antibody or antigen-binding fragment thereof comprises the VL sequence SEQ ID NO: 450, including one or more post-translational modifications of that sequence. In a particular embodiment, the VL comprises one, two or three CDRs selected from: a. CDR-L1, comprising the amino acid sequence SEQ ID NO: 992, b. CDR-L2, comprising the amino acid sequence SEQ ID NO: 1534, and c. CDR-L3, comprising the amino acid sequence SEQ ID NO: 2076.

[2267] In one aspect, an antibody or antigen-binding fragment thereof is provided, wherein the antibody or antigen-binding fragment thereof comprises a VH as in any of the embodiments provided above, and a VL as in any of the embodiments provided above. In some embodiments, the antibody or antigen-binding fragment thereof comprises the VH amino acid sequence of SEQ ID NO: 179, and the VL amino acid sequence of SEQ ID NO: 450, optionally including post-translational modifications of those sequences.

### TMEL1025

[2268] In one aspect, the present disclosure provides an antibody or antigen-binding fragment thereof comprising at least one or both variable regions selected from: a. VH comprising the amino acid sequence of SEQ ID NO: 180 and b. VL comprising the amino acid sequence of SEQ ID NO: 451.

[2269] In one aspect, the present disclosure provides an antibody or antigen-binding fragment thereof comprising at least one, two, three, four, five, or six CDRs selected from: a. CDR-H1 comprising the amino acid sequence of SEQ ID NO: 722, b. CDR-H2 comprising the amino acid sequence of SEQ ID NO: 1264, c. CDR-H3 comprising the amino acid sequence of SEQ ID NO: 1806, d. CDR-L1 comprising the amino acid sequence of SEQ ID NO: 993, e. CDR-L2 comprising the amino acid sequence of SEQ ID NO: 1535, and f. CDR-L3 comprising the amino acid sequence of SEQ ID NO: 2077.

[2270] In one aspect, the present disclosure provides an antibody or antigen-binding fragment thereof comprising a CDR-H3 comprising the amino acid sequence of SEQ ID NO: 1806, and a CDR-L3 comprising the amino acid sequence of SEQ ID NO: 2077.

[2271] In one aspect, the present disclosure provides an antibody or antigen-binding fragment thereof comprising at least one, at least two, or all three VH CDR sequences selected from: a. CDR-H1 comprising the amino acid sequence of SEQ ID NO: 722, b. CDR-H2 comprising the amino acid sequence of SEQ ID NO: 1264, c. CDR-H3 comprising the amino acid sequence of SEQ ID NO: 1806, and a VL comprising the amino acid sequence of SEQ ID NO: 451.

[2272] In one aspect, the present disclosure provides an antibody or antigen-binding fragment thereof comprising at least one, at least two, or all three VL CDR sequences selected from: a. CDR-L1 comprising the amino acid sequence of SEQ ID NO: 993, b. CDR-L2 comprising the amino acid sequence of SEQ ID NO: 1535, c. CDR-L3 comprising the amino acid sequence of SEQ ID NO: 2077, and a VH comprising the amino acid sequence of SEQ ID NO: 180.

[2273] In one aspect, an antibody or antigen-binding fragment thereof is provided, wherein the antibody or antigen-binding fragment thereof comprises a heavy chain variable domain (VH) having at least 90%, 91%, 92%, 93%, 94%, 95%, 96%, 97%, 98%, 99%, or 100% sequence identity to the amino acid sequence SEQ ID NO: 180. In some embodiments, a VH sequence having at least 90%, 91%, 92%, 93%, 94%, 95%, 96%, 97%, 98%, or 99% identity contains substitutions (e.g., conservative substitutions), insertions, or deletions relative to the reference sequence, but an antibody or antigen-binding fragment thereof comprising that sequence retains the ability to bind to same antigen as of the parent (e.g., cancer associated antigen). In some embodiments, a total of 1 to 10 amino acids have been substituted, inserted and/or deleted in the amino acid sequence SEQ ID NO: 180. In some embodiments, substitutions, insertions, or deletions occur in regions outside the CDRs (e.g., in the FRs). Optionally, the antibody or antigen-binding fragment thereof comprises the VH sequence SEQ ID NO: 180, including one or more post-translational modifications of that sequence. In a particular embodiment, the VH comprises one, two or three CDRs selected from: a. CDR-H1, comprising the amino acid sequence SEQ ID NO: 722, b. CDR-H2, comprising the amino acid sequence SEQ ID NO: 1264, and c. CDR-H3, comprising the amino acid sequence SEQ ID NO: 1806.

[2274] In one aspect, an antibody or antigen-binding fragment thereof is provided, wherein the antibody or antigen-binding fragment thereof comprises a light chain variable domain (VL) having at least 90%, 91%, 92%, 93%, 94%, 95%, 96%, 97%, 98%, 99%, or 100% sequence identity to the amino acid sequence SEQ ID NO: 451. In some embodiments, a VL sequence having at least 90%, 91%, 92%, 93%, 94%, 95%, 96%, 97%, 98%, or 99% identity contains substitutions (e.g., conservative substitutions), insertions, or deletions relative to the reference sequence, but an antibody or antigen-binding fragment thereof comprising that sequence retains the ability to bind to same antigen as the parent (e.g., cancer associated antigen). In some embodiments, a total of 1 to 10 amino acids have been substituted, inserted and/or deleted in the amino acid sequence SEQ ID NO: 451. In some embodiments, the substitutions, insertions, or deletions occur in regions outside the CDRs (e.g., in the FRs). Optionally, the antibody or antigen-binding fragment thereof comprises the VL sequence SEQ ID NO: 451, including one or more post-translational modifications of that sequence. In a particular embodiment, the VL comprises one, two or three CDRs selected from: a. CDR-L1, comprising the amino acid sequence SEQ ID NO: 993, b. CDR-L2, comprising the amino acid sequence SEQ ID NO: 1535, and c. CDR-L3, comprising the amino acid sequence SEQ ID NO: 2077.

[2275] In one aspect, an antibody or antigen-binding fragment thereof is provided, wherein the antibody or antigen-binding fragment thereof comprises a VH as in any of the embodiments provided above, and a VL as in any of the embodiments provided above. In some embodiments, the antibody or antigen-binding fragment thereof comprises the VH amino acid sequence of SEQ ID NO: 180, and the VL amino acid sequence of SEQ ID NO: 451, optionally including post-translational modifications of those sequences.

### TMEL1026

[2276] In one aspect, the present disclosure provides an antibody or antigen-binding fragment thereof comprising at least one or both variable regions selected from: a. VH comprising the amino acid sequence of SEQ ID NO: 181 and b. VL comprising the amino acid sequence of SEQ ID NO: 452.

[2277] In one aspect, the present disclosure provides an antibody or antigen-binding fragment thereof comprising at least one, two, three, four, five, or six CDRs selected from: a. CDR-H1 comprising the amino acid sequence of SEQ ID NO: 723, b. CDR-H2 comprising the amino acid sequence of SEQ ID NO: 1265, c. CDR-H3 comprising the amino acid sequence of SEQ ID NO: 1807, d. CDR-L1 comprising the amino acid sequence of SEQ ID NO: 994, e. CDR-L2 comprising the amino acid sequence of SEQ ID NO: 1536, and f. CDR-L3 comprising the amino acid sequence of SEQ ID NO: 2078.

[2278] In one aspect, the present disclosure provides an antibody or antigen-binding fragment thereof comprising a CDR-H3 comprising the amino acid sequence of SEQ ID NO: 1807, and a CDR-L3 comprising the amino acid sequence of SEQ ID NO: 2078.

[2279] In one aspect, the present disclosure provides an antibody or antigen-binding fragment thereof comprising at least one, at least two, or all three VH CDR sequences selected from: a. CDR-H1 comprising the amino acid sequence of SEQ ID NO: 723, b. CDR-H2 comprising the amino acid sequence of SEQ ID NO: 1265, c CDR-H3 comprising the amino acid sequence of SEQ ID NO: 1807, and a VL comprising the amino acid sequence of SEQ ID NO: 452.

[2280] In one aspect, the present disclosure provides an antibody or antigen-binding fragment thereof comprising at least one, at least two, or all three VL CDR sequences selected from: a. CDR-L1 comprising the amino acid sequence of SEQ ID NO: 994, b. CDR-L2 comprising the amino acid sequence of SEQ ID NO: 1536, c. CDR-L3 comprising the amino acid sequence of SEQ ID NO: 2078, and a VH comprising the amino acid sequence of SEQ ID NO: 181.

[2281] In one aspect, an antibody or antigen-binding fragment thereof is provided, wherein the antibody or antigen-binding fragment thereof comprises a heavy chain variable domain (VH) having at least 90%, 91%, 92%, 93%, 94%, 95%, 96%, 97%, 98%, 99%, or 100% sequence identity to the amino acid sequence SEQ ID NO: 181. In some embodiments, a VH sequence having at least 90%, 91%, 92%, 93%, 94%, 95%, 96%, 97%, 98%, or 99% identity contains substitutions (e.g., conservative substitutions), insertions, or deletions relative to the reference sequence, but an antibody or antigen-binding fragment thereof comprising that sequence retains the ability to bind to same antigen as of the parent (e.g., cancer associated antigen). In some embodiments, a total of 1 to 10 amino acids have been substituted, inserted and/or deleted in the amino acid sequence SEQ ID NO: 181. In some embodiments, substitutions, insertions, or deletions occur in regions outside the CDRs (e.g., in the FRs). Optionally, the antibody or antigen-binding fragment thereof comprises the VH sequence SEQ ID NO: 181, including one or more post-translational modifications of that sequence. In a particular embodiment, the VH comprises one, two or three CDRs selected from: a. CDR-H1, comprising the amino acid sequence SEQ ID NO: 723, b. CDR-H2, comprising the amino acid sequence SEQ ID NO: 1265, and c. CDR-H3, comprising the amino acid sequence SEQ ID NO: 1807.

[2282] In one aspect, an antibody or antigen-binding fragment thereof is provided, wherein the antibody or antigen-binding fragment thereof comprises a light chain variable domain (VL) having at least 90%, 91%, 92%, 93%, 94%, 95%, 96%, 97%, 98%, 99%, or 100% sequence identity to the amino acid sequence SEQ ID NO: 452. In some embodiments, a VL sequence having at least 90%, 91%, 92%, 93%, 94%, 95%, 96%, 97%, 98%, or 99% identity contains substitutions (e.g., conservative substitutions), insertions, or deletions relative to the reference sequence, but an antibody or antigen-binding fragment thereof comprising that sequence retains the ability to bind to same antigen as the parent (e.g., cancer associated antigen). In some embodiments, a total of 1 to 10 amino acids have been substituted, inserted and/or deleted in the amino acid sequence SEQ ID NO: 452. In some embodiments, the substitutions, insertions, or deletions occur in regions outside the CDRs (e.g., in the FRs). Optionally, the antibody or antigen-binding fragment thereof comprises the VL sequence SEQ ID NO: 452, including one or more post-translational modifications of that sequence. In a particular embodiment, the VL comprises one, two or three CDRs selected from: a. CDR-L1, comprising the amino acid sequence SEQ ID NO: 994, b. CDR-L2, comprising the amino acid sequence SEQ ID NO: 1536, and CDR-L3, comprising the amino acid sequence SEQ ID NO: 2078.

[2283] In one aspect, an antibody or antigen-binding fragment thereof is provided, wherein the antibody or antigen-binding fragment thereof comprises a VH as in any of the embodiments provided above, and a VL as in any of the embodiments provided above. In some embodiments, the antibody or antigen-binding fragment thereof comprises the VH amino acid sequence of SEQ ID NO: 181, and the VL amino acid sequence of SEQ ID NO: 452, optionally including post-translational modifications of those sequences.

### TMEL1027

[2284] In one aspect, the present disclosure provides an antibody or antigen-binding fragment thereof comprising at least one or both variable regions selected from: a. VH comprising the amino acid sequence of SEQ ID NO: 182 and b. VL comprising the amino acid sequence of SEQ ID NO: 453.

[2285] In one aspect, the present disclosure provides an antibody or antigen-binding fragment thereof comprising at least one, two, three, four, five, or six CDRs selected from: a. CDR-H1 comprising the amino acid sequence of SEQ ID NO: 724, b. CDR-H2 comprising the amino acid sequence of SEQ ID NO: 1266, c. CDR-H3 comprising the amino acid sequence of SEQ ID NO: 1808, d. CDR-L1 comprising the amino acid sequence of SEQ ID NO: 995, e. CDR-L2 comprising the amino acid sequence of SEQ ID NO: 1537, and f. CDR-L3 comprising the amino acid sequence of SEQ ID NO: 2079.

[2286] In one aspect, the present disclosure provides an antibody or antigen-binding fragment thereof comprising a CDR-H3 comprising the amino acid sequence of SEQ ID NO: 1808, and a CDR-L3 comprising the amino acid sequence of SEQ ID NO: 2079.

[2287] In one aspect, the present disclosure provides an antibody or antigen-binding fragment thereof comprising at least one, at least two, or all three VH CDR sequences selected from: a. CDR-H1 comprising the amino acid sequence of SEQ ID NO: 724, b. CDR-H2 comprising the amino acid sequence of SEQ ID NO: 1266, c. CDR-H3 comprising the amino acid sequence of SEQ ID NO: 1808, and a VL comprising the amino acid sequence of SEQ ID NO: 453.

[2288] In one aspect, the present disclosure provides an antibody or antigen-binding fragment thereof comprising at least one, at least two, or all three VL CDR sequences selected from: a. CDR-L1 comprising the amino acid sequence of SEQ ID NO: 995, b. CDR-L2 comprising the amino acid sequence of SEQ ID NO: 1537, c. CDR-L3 comprising the amino acid sequence of SEQ ID NO: 2079, and a VH comprising the amino acid sequence of SEQ ID NO: 182.

[2289] In one aspect, an antibody or antigen-binding fragment thereof is provided, wherein the antibody or antigen-binding fragment thereof comprises a heavy chain variable domain (VH) having at least 90%, 91%, 92%, 93%, 94%, 95%, 96%, 97%, 98%, 99%, or 100% sequence identity to the amino acid sequence SEQ ID NO: 182. In some embodiments, a VH sequence having at least 90%, 91%, 92%, 93%, 94%, 95%, 96%, 97%, 98%, or 99% identity contains substitutions (e.g., conservative substitutions), insertions, or deletions relative to the reference sequence, but an antibody or antigen-binding fragment thereof comprising that sequence retains the ability to bind to same antigen as of the parent (e.g., cancer associated antigen). In some embodiments, a total of 1 to 10 amino acids have been substituted, inserted and/or deleted in the amino acid sequence SEQ ID NO: 182. In some embodiments, substitutions, insertions, or deletions occur in regions outside the CDRs (e.g., in the FRs). Optionally, the antibody or antigen-binding fragment thereof comprises the VH sequence SEQ ID NO: 182, including one or more post-translational modifications of that sequence. In a particular embodiment, the VH comprises one, two or three CDRs selected from: a. CDR-H1, comprising the amino acid sequence SEQ ID NO: 724, b. CDR-H2, comprising the amino acid sequence SEQ ID NO: 1266, and c. CDR-H3, comprising the amino acid sequence SEQ ID NO: 1808.

[2290] In one aspect, an antibody or antigen-binding fragment thereof is provided, wherein the antibody or antigen-binding fragment thereof comprises a light chain variable domain (VL) having at least 90%, 91%, 92%, 93%, 94%, 95%, 96%, 97%, 98%, 99%, or 100% sequence identity to the amino acid sequence SEQ ID NO: 453. In some embodiments, a VL sequence having at least 90%, 91%, 92%, 93%, 94%, 95%, 96%, 97%, 98%, or 99% identity contains substitutions (e.g., conservative substitutions), insertions, or deletions relative to the reference sequence, but an antibody or antigen-binding fragment thereof comprising that sequence retains the ability to bind to same antigen as the parent (e.g., cancer associated antigen). In some embodiments, a total of 1 to 10 amino acids have been substituted, inserted and/or deleted in the amino acid sequence SEQ ID NO: 453. In some embodiments, the substitutions, insertions, or deletions occur in regions outside the CDRs (e.g., in the FRs). Optionally, the antibody or antigen-binding fragment thereof comprises the VL sequence SEQ ID NO: 453, including one or more post-translational modifications of that sequence. In a particular embodiment, the VL comprises one, two or three CDRs selected from: a. CDR-L1, comprising the amino acid sequence SEQ ID NO: 995, b. CDR-L2, comprising the amino acid sequence SEQ ID NO: 1537, and c. CDR-L3, comprising the amino acid sequence SEQ ID NO: 2079.

[2291] In one aspect, an antibody or antigen-binding fragment thereof is provided, wherein the antibody or antigen-binding fragment thereof comprises a VH as in any of the embodiments provided above, and a VL as in any of the embodiments provided above. In some embodiments, the antibody or antigen-binding fragment thereof comprises the VH amino acid sequence of SEQ ID NO: 182, and the VL amino acid sequence of SEQ ID NO: 453, optionally including post-translational modifications of those sequences.

### TMEL1028

[2292] In one aspect, the present disclosure provides an antibody or antigen-binding fragment thereof comprising at least one or both variable regions selected from: a. VH comprising the amino acid sequence of SEQ ID NO: 183 and b. VL comprising the amino acid sequence of SEQ ID NO: 454.

[2293] In one aspect, the present disclosure provides an antibody or antigen-binding fragment thereof comprising at least one, two, three, four, five, or six CDRs selected from: a. CDR-H1 comprising the amino acid sequence of SEQ ID NO: 725, b. CDR-H2 comprising the amino acid sequence of SEQ ID NO: 1267, c. CDR-H3 comprising the amino acid sequence of SEQ ID NO: 1809, d. CDR-L1 comprising the amino acid sequence of SEQ ID NO: 996, e. CDR-L2 comprising the amino acid sequence of SEQ ID NO: 1538, and f. CDR-L3 comprising the amino acid sequence of SEQ ID NO: 2080.

[2294] In one aspect, the present disclosure provides an antibody or antigen-binding fragment thereof comprising a CDR-H3 comprising the amino acid sequence of SEQ ID NO: 1809, and a CDR-L3 comprising the amino acid sequence of SEQ ID NO: 2080.

[2295] In one aspect, the present disclosure provides an antibody or antigen-binding fragment thereof comprising at least one, at least two, or all three VH CDR sequences selected from: a. CDR-H1 comprising the amino acid sequence of SEQ ID NO: 725, b. CDR-H2 comprising the amino acid sequence of SEQ ID NO: 1267, c. CDR-H3 comprising the amino acid sequence of SEQ ID NO: 1809, and a VL comprising the amino acid sequence of SEQ ID NO: 454.

[2296] In one aspect, the present disclosure provides an antibody or antigen-binding fragment thereof comprising at least one, at least two, or all three VL CDR sequences selected from: a. CDR-L1 comprising the amino acid sequence of SEQ ID NO: 996, b. CDR-L2 comprising the amino acid sequence of SEQ ID NO: 1538, c. CDR-L3 comprising the amino acid sequence of SEQ ID NO: 2080, and a VH comprising the amino acid sequence of SEQ ID NO: 183.

[2297] In one aspect, an antibody or antigen-binding fragment thereof is provided, wherein the antibody or antigen-binding fragment thereof comprises a heavy chain variable domain (VH) having at least 90%, 91%, 92%, 93%, 94%, 95%, 96%, 97%, 98%, 99%, or 100% sequence identity to the amino acid sequence SEQ ID NO: 183. In some embodiments, a VH sequence having at least 90%, 91%, 92%, 93%, 94%, 95%, 96%, 97%, 98%, or 99% identity contains substitutions (e.g., conservative substitutions), insertions, or deletions relative to the reference sequence, but an antibody or antigen-binding fragment thereof comprising that sequence retains the ability to bind to same antigen as of the parent (e.g., cancer associated antigen). In some embodiments, a total of 1 to 10 amino acids have been substituted, inserted and/or deleted in the amino acid sequence SEQ ID NO: 183. In some embodiments, substitutions, insertions, or deletions occur in regions outside the CDRs (e.g., in the FRs). Optionally, the antibody or antigen-binding fragment thereof comprises the VH sequence SEQ ID NO: 183, including one or more post-translational modifications of that sequence. In a particular embodiment, the VH comprises one, two or three CDRs selected from: a. CDR-H1, comprising the amino acid sequence SEQ ID NO: 725, b. CDR-H2, comprising the amino acid sequence SEQ ID NO: 1267, and c. CDR-H3, comprising the amino acid sequence SEQ ID NO: 1809.

[2298] In one aspect, an antibody or antigen-binding fragment thereof is provided, wherein the antibody or antigen-binding fragment thereof comprises a light chain variable domain (VL) having at least 90%, 91%, 92%, 93%, 94%, 95%, 96%, 97%, 98%, 99%, or 100% sequence identity to the amino acid sequence SEQ ID NO: 454. In some embodiments, a VL sequence having at least 90%, 91%, 92%, 93%, 94%, 95%, 96%, 97%, 98%, or 99% identity contains substitutions (e.g., conservative substitutions), insertions, or deletions relative to the reference sequence, but an antibody or antigen-binding fragment thereof comprising that sequence retains the ability to bind to same antigen as the parent (e.g., cancer associated antigen). In some embodiments, a total of 1 to 10 amino acids have been substituted, inserted and/or deleted in the amino acid sequence SEQ ID NO: 454. In some embodiments, the substitutions, insertions, or deletions occur in regions outside the CDRs (e.g., in the FRs). Optionally, the antibody or antigen-binding fragment thereof comprises the VL sequence SEQ ID NO: 454, including one or more post-translational modifications of that sequence. In a particular embodiment, the VL comprises one, two or three CDRs selected from: a. CDR-L1, comprising the amino acid sequence SEQ ID NO: 996, b. CDR-L2, comprising the amino acid sequence SEQ ID NO: 1538, and c. CDR-L3, comprising the amino acid sequence SEQ ID NO: 2080.

[2299] In one aspect, an antibody or antigen-binding fragment thereof is provided, wherein the antibody or antigen-binding fragment thereof comprises a VH as in any of the embodiments provided above, and a VL as in any of the embodiments provided above. In some embodiments, the antibody or antigen-binding fragment thereof comprises the VH amino acid sequence of SEQ ID NO: 183, and the VL amino acid sequence of SEQ ID NO: 454, optionally including post-translational modifications of those sequences.

### TMEL1029

[2300] In one aspect, the present disclosure provides an antibody or antigen-binding fragment thereof comprising at least one or both variable regions selected from: a. VH comprising the amino acid sequence of SEQ ID NO: 184 and b. VL comprising the amino acid sequence of SEQ ID NO: 455.

[2301] In one aspect, the present disclosure provides an antibody or antigen-binding fragment thereof comprising at least one, two, three, four, five, or six CDRs selected from: a. CDR-H1 comprising the amino acid sequence of SEQ ID NO: 726, b. CDR-H2 comprising the amino acid sequence of SEQ ID NO: 1268, c. CDR-H3 comprising the amino acid sequence of SEQ ID NO: 1810, d. CDR-L1 comprising the amino acid sequence of SEQ ID NO: 997, e. CDR-L2 comprising the amino acid sequence of SEQ ID NO: 1539, and f. CDR-L3 comprising the amino acid sequence of SEQ ID NO: 2081.

[2302] In one aspect, the present disclosure provides an antibody or antigen-binding fragment thereof comprising a CDR-H3 comprising the amino acid sequence of SEQ ID NO: 1810, and a CDR-L3 comprising the amino acid sequence of SEQ ID NO: 2081.

[2303] In one aspect, the present disclosure provides an antibody or antigen-binding fragment thereof comprising at least one, at least two, or all three VH CDR sequences selected from: a. CDR-H1 comprising the amino acid sequence of SEQ ID NO: 726, b. CDR-H2 comprising the amino acid sequence of SEQ ID NO: 1268, c. CDR-H3 comprising the amino acid sequence of SEQ ID NO: 1810, and a VL comprising the amino acid sequence of SEQ ID NO: 455.

[2304] In one aspect, the present disclosure provides an antibody or antigen-binding fragment thereof comprising at least one, at least two, or all three VL CDR sequences selected from: a. CDR-L1 comprising the amino acid sequence of SEQ ID NO: 997, b. CDR-L2 comprising the amino acid sequence of SEQ ID NO: 1539, c. CDR-L3 comprising the amino acid sequence of SEQ ID NO: 2081, and a VH comprising the amino acid sequence of SEQ ID NO: 184.

[2305] In one aspect, an antibody or antigen-binding fragment thereof is provided, wherein the antibody or antigen-binding fragment thereof comprises a heavy chain variable domain (VH) having at least 90%, 91%, 92%, 93%, 94%, 95%, 96%, 97%, 98%, 99%, or 100% sequence identity to the amino acid sequence SEQ ID NO: 184. In some embodiments, a VH sequence having at least 90%, 91%, 92%, 93%, 94%, 95%, 96%, 97%, 98%, or 99% identity contains substitutions (e.g., conservative substitutions), insertions, or deletions relative to the reference sequence, but an antibody or antigen-binding fragment thereof comprising that sequence retains the ability to bind to same antigen as of the parent (e.g., cancer associated antigen). In some embodiments, a total of 1 to 10 amino acids have been substituted, inserted and/or deleted in the amino acid sequence SEQ ID NO: 184. In some embodiments, substitutions, insertions, or deletions occur in regions outside the CDRs (e.g., in the FRs). Optionally, the antibody or antigen-binding fragment thereof comprises the VH sequence SEQ ID NO: 184, including one or more post-translational modifications of that sequence. In a particular embodiment, the VH comprises one, two or three CDRs selected from: a. CDR-H1, comprising the amino acid sequence SEQ ID NO: 726, b. CDR-H2, comprising the amino acid sequence SEQ ID NO: 1268, and c. CDR-H3, comprising the amino acid sequence SEQ ID NO: 1810.

[2306] In one aspect, an antibody or antigen-binding fragment thereof is provided, wherein the antibody or antigen-binding fragment thereof comprises a light chain variable domain (VL) having at least 90%, 91%, 92%, 93%, 94%, 95%, 96%, 97%, 98%, 99%, or 100% sequence identity to the amino acid sequence SEQ ID NO: 455. In some embodiments, a VL sequence having at least 90%, 91%, 92%, 93%, 94%, 95%, 96%, 97%, 98%, or 99% identity contains substitutions (e.g., conservative substitutions), insertions, or deletions relative to the reference sequence, but an antibody or antigen-binding fragment thereof comprising that sequence retains the ability to bind to same antigen as the parent (e.g., cancer associated antigen). In some embodiments, a total of 1 to 10 amino acids have been substituted, inserted and/or deleted in the amino acid sequence SEQ ID NO: 455. In some embodiments, the substitutions, insertions, or deletions occur in regions outside the CDRs (e.g., in the FRs). Optionally, the antibody or antigen-binding fragment thereof comprises the VL sequence SEQ ID NO: 455, including one or more post-translational modifications of that sequence. In a particular embodiment, the VL comprises one, two or three CDRs selected from: a. CDR-L1, comprising the amino acid sequence SEQ ID NO: 997, b. CDR-L2, comprising the amino acid sequence SEQ ID NO: 1539, and c. CDR-L3, comprising the amino acid sequence SEQ ID NO: 2081.

[2307] In one aspect, an antibody or antigen-binding fragment thereof is provided, wherein the antibody or antigen-binding fragment thereof comprises a VH as in any of the embodiments provided above, and a VL as in any of the embodiments provided above. In some embodiments, the antibody or antigen-binding fragment thereof comprises the VH amino acid sequence of SEQ ID NO: 184, and the VL amino acid sequence of SEQ ID NO: 455, optionally including post-translational modifications of those sequences.

### TMEL1030

[2308] In one aspect, the present disclosure provides an antibody or antigen-binding fragment thereof comprising at least one or both variable regions selected from: a. VH comprising the amino acid sequence of SEQ ID NO: 185 and b. VL comprising the amino acid sequence of SEQ ID NO: 456.

[2309] In one aspect, the present disclosure provides an antibody or antigen-binding fragment thereof comprising at least one, two, three, four, five, or six CDRs selected from: a. CDR-H1 comprising the amino acid sequence of SEQ ID NO: 727, b. CDR-H2 comprising the amino acid sequence of SEQ ID NO: 1269, c. CDR-H3 comprising the amino acid sequence of SEQ ID NO: 1811, d. CDR-L1 comprising the amino acid sequence of SEQ ID NO: 998, e. CDR-L2 comprising the amino acid sequence of SEQ ID NO: 1540, and f. CDR-L3 comprising the amino acid sequence of SEQ ID NO: 2082.

[2310] In one aspect, the present disclosure provides an antibody or antigen-binding fragment thereof comprising a CDR-H3 comprising the amino acid sequence of SEQ ID NO: 1811, and a CDR-L3 comprising the amino acid sequence of SEQ ID NO: 2082.

[2311] In one aspect, the present disclosure provides an antibody or antigen-binding fragment thereof comprising at least one, at least two, or all three VH CDR sequences selected from: a. CDR-H1 comprising the amino acid sequence of SEQ ID NO: 727, b. CDR-H2 comprising the amino acid sequence of SEQ ID NO: 1269, c. CDR-H3 comprising the amino acid sequence of SEQ ID NO: 1811, and a VL comprising the amino acid sequence of SEQ ID NO: 456.

[2312] In one aspect, the present disclosure provides an antibody or antigen-binding fragment thereof comprising at least one, at least two, or all three VL CDR sequences selected from: a. CDR-L1 comprising the amino acid sequence of SEQ ID NO: 998, b. CDR-L2 comprising the amino acid sequence of SEQ ID NO: 1540, c. CDR-L3 comprising the amino acid sequence of SEQ ID NO: 2082, and a VH comprising the amino acid sequence of SEQ ID NO: 185.

[2313] In one aspect, an antibody or antigen-binding fragment thereof is provided, wherein the antibody or antigen-binding fragment thereof comprises a heavy chain variable domain (VH) having at least 90%, 91%, 92%, 93%, 94%, 95%, 96%, 97%, 98%, 99%, or 100% sequence identity to the amino acid sequence SEQ ID NO: 185. In some embodiments, a VH sequence having at least 90%, 91%, 92%, 93%, 94%, 95%, 96%, 97%, 98%, or 99% identity contains substitutions (e.g., conservative substitutions), insertions, or deletions relative to the reference sequence, but an antibody or antigen-binding fragment thereof comprising that sequence retains the ability to bind to same antigen as of the parent (e.g., cancer associated antigen). In some embodiments, a total of 1 to 10 amino acids have been substituted, inserted and/or deleted in the amino acid sequence SEQ ID NO: 185. In some embodiments, substitutions, insertions, or deletions occur in regions outside the CDRs (e.g., in the FRs). Optionally, the antibody or antigen-binding fragment thereof comprises the VH sequence SEQ ID NO: 185, including one or more post-translational modifications of that sequence. In a particular embodiment, the VH comprises one, two or three CDRs selected from: a. CDR-H1, comprising the amino acid sequence SEQ ID NO: 727, b. CDR-H2, comprising the amino acid sequence SEQ ID NO: 1269, and c. CDR-H3, comprising the amino acid sequence SEQ ID NO: 1811.

[2314] In one aspect, an antibody or antigen-binding fragment thereof is provided, wherein the antibody or antigen-binding fragment thereof comprises a light chain variable domain (VL) having at least 90%, 91%, 92%, 93%, 94%, 95%, 96%, 97%, 98%, 99%, or 100% sequence identity to the amino acid sequence SEQ ID NO: 456. In some embodiments, a VL sequence having at least 90%, 91%, 92%, 93%, 94%, 95%, 96%, 97%, 98%, or 99% identity contains substitutions (e.g., conservative substitutions), insertions, or deletions relative to the reference sequence, but an antibody or antigen-binding fragment thereof comprising that sequence retains the ability to bind to same antigen as the parent (e.g., cancer associated antigen). In some embodiments, a total of 1 to 10 amino acids have been substituted, inserted and/or deleted in the amino acid sequence SEQ ID NO: 456. In some embodiments, the substitutions, insertions, or deletions occur in regions outside the CDRs (e.g., in the FRs). Optionally, the antibody or antigen-binding fragment thereof comprises the VL sequence SEQ ID NO: 456, including one or more post-translational modifications of that sequence. In a particular embodiment, the VL comprises one, two or three CDRs selected from: a. CDR-L1, comprising the amino acid sequence SEQ ID NO: 998, b. CDR-L2, comprising the amino acid sequence SEQ ID NO: 1540, and c. CDR-L3, comprising the amino acid sequence SEQ ID NO: 2082.

[2315] In one aspect, an antibody or antigen-binding fragment thereof is provided, wherein the antibody or antigen-binding fragment thereof comprises a VH as in any of the embodiments provided above, and a VL as in any of the embodiments provided above. In some embodiments, the antibody or antigen-binding fragment thereof comprises the VH amino acid sequence of SEQ ID NO: 185, and the VL amino acid sequence of SEQ ID NO: 456, optionally including post-translational modifications of those sequences.

### TMEL1031

[2316] In one aspect, the present disclosure provides an antibody or antigen-binding fragment thereof comprising at least one or both variable regions selected from: a. VH comprising the amino acid sequence of SEQ ID NO: 186 and b. VL comprising the amino acid sequence of SEQ ID NO: 457.

[2317] In one aspect, the present disclosure provides an antibody or antigen-binding fragment thereof comprising at least one, two, three, four, five, or six CDRs selected from: a. CDR-H1 comprising the amino acid sequence of SEQ ID NO: 728, b. CDR-H2 comprising the amino acid sequence of SEQ ID NO: 1270, c. CDR-H3 comprising the amino acid sequence of SEQ ID NO: 1812, d. CDR-L1 comprising the amino acid sequence of SEQ ID NO: 999, e. CDR-L2 comprising the amino acid sequence of SEQ ID NO: 1541, and f. CDR-L3 comprising the amino acid sequence of SEQ ID NO: 2083.

[2318] In one aspect, the present disclosure provides an antibody or antigen-binding fragment thereof comprising a CDR-H3 comprising the amino acid sequence of SEQ ID NO: 1812, and a CDR-L3 comprising the amino acid sequence of SEQ ID NO: 2083.

[2319] In one aspect, the present disclosure provides an antibody or antigen-binding fragment thereof comprising at least one, at least two, or all three VH CDR sequences selected from: a. CDR-H1 comprising the amino acid sequence of SEQ ID NO: 728, b. CDR-H2 comprising the amino acid sequence of SEQ ID NO: 1270, c. CDR-H3 comprising the amino acid sequence of SEQ ID NO: 1812, and a VL comprising the amino acid sequence of SEQ ID NO: 457.

[2320] In one aspect, the present disclosure provides an antibody or antigen-binding fragment thereof comprising at least one, at least two, or all three VL CDR sequences selected from: a. CDR-L1 comprising the amino acid sequence of SEQ ID NO: 999, b. CDR-L2 comprising the amino acid sequence of SEQ ID NO: 1541, c. CDR-L3 comprising the amino acid sequence of SEQ ID NO: 2083, and a VH comprising the amino acid sequence of SEQ ID NO: 186.

[2321] In one aspect, an antibody or antigen-binding fragment thereof is provided, wherein the antibody or antigen-binding fragment thereof comprises a heavy chain variable domain (VH) having at least 90%, 91%, 92%, 93%, 94%, 95%, 96%, 97%, 98%, 99%, or 100% sequence identity to the amino acid sequence SEQ ID NO: 186. In some embodiments, a VH sequence having at least 90%, 91%, 92%, 93%, 94%, 95%, 96%, 97%, 98%, or 99% identity contains substitutions (e.g., conservative substitutions), insertions, or deletions relative to the reference sequence, but an antibody or antigen-binding fragment thereof comprising that sequence retains the ability to bind to same antigen as of the parent (e.g., cancer associated antigen). In some embodiments, a total of 1 to 10 amino acids have been substituted, inserted and/or deleted in the amino acid sequence SEQ ID NO: 186. In some embodiments, substitutions, insertions, or deletions occur in regions outside the CDRs (e.g., in the FRs). Optionally, the antibody or antigen-binding fragment thereof comprises the VH sequence SEQ ID NO: 186, including one or more post-translational modifications of that sequence. In a particular embodiment, the VH comprises one, two or three CDRs selected from: a. CDR-H1, comprising the amino acid sequence SEQ ID NO: 728, b. CDR-H2, comprising the amino acid sequence SEQ ID NO: 1270, and c. CDR-H3, comprising the amino acid sequence SEQ ID NO: 1812.

[2322] In one aspect, an antibody or antigen-binding fragment thereof is provided, wherein the antibody or antigen-binding fragment thereof comprises a light chain variable domain (VL) having at least 90%, 91%, 92%, 93%, 94%, 95%, 96%, 97%, 98%, 99%, or 100% sequence identity to the amino acid sequence SEQ ID NO: 457. In some embodiments, a VL sequence having at least 90%, 91%, 92%, 93%, 94%, 95%, 96%, 97%, 98%, or 99% identity contains substitutions (e.g., conservative substitutions), insertions, or deletions relative to the reference sequence, but an antibody or antigen-binding fragment thereof comprising that sequence retains the ability to bind to same antigen as the parent (e.g., cancer associated antigen). In some embodiments, a total of 1 to 10 amino acids have been substituted, inserted and/or deleted in the amino acid sequence SEQ ID NO: 457. In some embodiments, the substitutions, insertions, or deletions occur in regions outside the CDRs (e.g., in the FRs). Optionally, the antibody or antigen-binding fragment thereof comprises the VL sequence SEQ ID NO: 457, including one or more post-translational modifications of that sequence. In a particular embodiment, the VL comprises one, two or three CDRs selected from: a. CDR-L1, comprising the amino acid sequence SEQ ID NO: 999, b. CDR-L2, comprising the amino acid sequence SEQ ID NO: 1541, and c. CDR-L3, comprising the amino acid sequence SEQ ID NO: 2083.

[2323] In one aspect, an antibody or antigen-binding fragment thereof is provided, wherein the antibody or antigen-binding fragment thereof comprises a VH as in any of the embodiments provided above, and a VL as in any of the embodiments provided above. In some embodiments, the antibody or antigen-binding fragment thereof comprises the VH amino acid sequence of SEQ ID NO: 186, and the VL amino acid sequence of SEQ ID NO: 457, optionally including post-translational modifications of those sequences.

### TMEL1032

[2324] In one aspect, the present disclosure provides an antibody or antigen-binding fragment thereof comprising at least one or both variable regions selected from: a. VH comprising the amino acid sequence of SEQ ID NO: 187 and b. VL comprising the amino acid sequence of SEQ ID NO: 458.

[2325] In one aspect, the present disclosure provides an antibody or antigen-binding fragment thereof comprising at least one, two, three, four, five, or six CDRs selected from: a. CDR-H1 comprising the amino acid sequence of SEQ ID NO: 729, b. CDR-H2 comprising the amino acid sequence of SEQ ID NO: 1271, c. CDR-H3 comprising the amino acid sequence of SEQ ID NO: 1813, d. CDR-L1 comprising the amino acid sequence of SEQ ID NO: 1000, e. CDR-L2 comprising the amino acid sequence of SEQ ID NO: 1542, and f. CDR-L3 comprising the amino acid sequence of SEQ ID NO: 2084.

[2326] In one aspect, the present disclosure provides an antibody or antigen-binding fragment thereof comprising a CDR-H3 comprising the amino acid sequence of SEQ ID NO: 1813, d. CDR-L1 comprising the amino acid sequence of SEQ ID NO: 1000 and a CDR-L3 comprising the amino acid sequence of SEQ ID NO: 2084.

[2327] In one aspect, the present disclosure provides an antibody or antigen-binding fragment thereof comprising at least one, at least two, or all three VH CDR sequences selected from: a. CDR-H1 comprising the amino acid sequence of SEQ ID NO: 729, b. CDR-H2 comprising the amino acid sequence of SEQ ID NO: 1271, c. CDR-H3 comprising the amino acid sequence of SEQ ID NO: 1813, and a VL comprising the amino acid sequence of SEQ ID NO: 458.

[2328] In one aspect, the present disclosure provides an antibody or antigen-binding fragment thereof comprising at least one, at least two, or all three VL CDR sequences selected from: a. CDR-L1 comprising the amino acid sequence of SEQ ID NO: 1000, b. CDR-L2 comprising the amino acid sequence of SEQ ID NO: 1542, c. CDR-L3 comprising the amino acid sequence of SEQ ID NO: 2084, and a VH comprising the amino acid sequence of SEQ ID NO: 187.

[2329] In one aspect, an antibody or antigen-binding fragment thereof is provided, wherein the antibody or antigen-binding fragment thereof comprises a heavy chain variable domain (VH) having at least 90%, 91%, 92%, 93%, 94%, 95%, 96%, 97%, 98%, 99%, or 100% sequence identity to the amino acid sequence SEQ ID NO: 187. In some embodiments, a VH sequence having at least 90%, 91%, 92%, 93%, 94%, 95%, 96%, 97%, 98%, or 99% identity contains substitutions (e.g., conservative substitutions), insertions, or deletions relative to the reference sequence, but an antibody or antigen-binding fragment thereof comprising that sequence retains the ability to bind to same antigen as of the parent (e.g., cancer associated antigen). In some embodiments, a total of 1 to 10 amino acids have been substituted, inserted and/or deleted in the amino acid sequence SEQ ID NO: 187. In some embodiments, substitutions, insertions, or deletions occur in regions outside the CDRs (e.g., in the FRs). Optionally, the antibody or antigen-binding fragment thereof comprises the VH sequence SEQ ID NO: 187, including one or more post-translational modifications of that sequence. In a particular embodiment, the VH comprises one, two or three CDRs selected from: a. CDR-H1, comprising the amino acid sequence SEQ ID NO: 729, b. CDR-H2, comprising the amino acid sequence SEQ ID NO: 1271, and c. CDR-H3, comprising the amino acid sequence SEQ ID NO: 1813.

[2330] In one aspect, an antibody or antigen-binding fragment thereof is provided, wherein the antibody or antigen-binding fragment thereof comprises a light chain variable domain (VL) having at least 90%, 91%, 92%, 93%, 94%, 95%, 96%, 97%, 98%, 99%, or 100% sequence identity to the amino acid sequence SEQ ID NO: 458. In some embodiments, a VL sequence having at least 90%, 91%, 92%, 93%, 94%, 95%, 96%, 97%, 98%, or 99% identity contains substitutions (e.g., conservative substitutions), insertions, or deletions relative to the reference sequence, but an antibody or antigen-binding fragment thereof comprising that sequence retains the ability to bind to same antigen as the parent (e.g., cancer associated antigen). In some embodiments, a total of 1 to 10 amino acids have been substituted, inserted and/or deleted in the amino acid sequence SEQ ID NO: 458. In some embodiments, the substitutions, insertions, or deletions occur in regions outside the CDRs (e.g., in the FRs). Optionally, the antibody or antigen-binding fragment thereof comprises the VL sequence SEQ ID NO: 458, including one or more post-translational modifications of that sequence. In a particular embodiment, the VL comprises one, two or three CDRs selected from: a. CDR-L1, comprising the amino acid sequence SEQ ID NO: 1000, b. CDR-L2, comprising the amino acid sequence SEQ ID NO: 1542, and c. CDR-L3, comprising the amino acid sequence SEQ ID NO: 2084.

[2331] In one aspect, an antibody or antigen-binding fragment thereof is provided, wherein the antibody or antigen-binding fragment thereof comprises a VH as in any of the embodiments provided above, and a VL as in any of the embodiments provided above. In some embodiments, the antibody or antigen-binding fragment thereof comprises the VH amino acid sequence of SEQ ID NO: 187, and the VL amino acid sequence of SEQ ID NO: 458, optionally including post-translational modifications of those sequences.

### TMEL1033

[2332] In one aspect, the present disclosure provides an antibody or antigen-binding fragment thereof comprising at least one or both variable regions selected from: a. VH comprising the amino acid sequence of SEQ ID NO: 188 and b. VL comprising the amino acid sequence of SEQ ID NO: 459.

[2333] In one aspect, the present disclosure provides an antibody or antigen-binding fragment thereof comprising at least one, two, three, four, five, or six CDRs selected from: a. CDR-H1 comprising the amino acid sequence of SEQ ID NO: 730, b. CDR-H2 comprising the amino acid sequence of SEQ ID NO: 1272, c. CDR-H3 comprising the amino acid sequence of SEQ ID NO: 1814, d. CDR-L1 comprising the amino acid sequence of SEQ ID NO: 1001, e. CDR-L2 comprising the amino acid sequence of SEQ ID NO: 1543, and f. CDR-L3 comprising the amino acid sequence of SEQ ID NO: 2085.

[2334] In one aspect, the present disclosure provides an antibody or antigen-binding fragment thereof comprising a CDR-H3 comprising the amino acid sequence of SEQ ID NO: 1814, and a CDR-L3 comprising the amino acid sequence of SEQ ID NO: 2085.

[2335] In one aspect, the present disclosure provides an antibody or antigen-binding fragment thereof comprising at least one, at least two, or all three VH CDR sequences selected from: a. CDR-H1 comprising the amino acid sequence of SEQ ID NO: 730, b. CDR-H2 comprising the amino acid sequence of SEQ ID NO: 1272, c. CDR-H3 comprising the amino acid sequence of SEQ ID NO: 1814, and a VL comprising the amino acid sequence of SEQ ID NO: 459.

[2336] In one aspect, the present disclosure provides an antibody or antigen-binding fragment thereof comprising at least one, at least two, or all three VL CDR sequences selected from: a. CDR-L1 comprising the amino acid sequence of SEQ ID NO: 1001, b. CDR-L2 comprising the amino acid sequence of SEQ ID NO: 1543, c. CDR-L3 comprising the amino acid sequence of SEQ ID NO: 2085, and a VH comprising the amino acid sequence of SEQ ID NO: 188.

[2337] In one aspect, an antibody or antigen-binding fragment thereof is provided, wherein the antibody or antigen-binding fragment thereof comprises a heavy chain variable domain (VH) having at least 90%, 91%, 92%, 93%, 94%, 95%, 96%, 97%, 98%, 99%, or 100% sequence identity to the amino acid sequence SEQ ID NO: 188. In some embodiments, a VH sequence having at least 90%, 91%, 92%, 93%, 94%, 95%, 96%, 97%, 98%, or 99% identity contains substitutions (e.g., conservative substitutions), insertions, or deletions relative to the reference sequence, but an antibody or antigen-binding fragment thereof comprising that sequence retains the ability to bind to same antigen as of the parent (e.g., cancer associated antigen). In some embodiments, a total of 1 to 10 amino acids have been substituted, inserted and/or deleted in the amino acid sequence SEQ ID NO: 188. In some embodiments, substitutions, insertions, or deletions occur in regions outside the CDRs (e.g., in the FRs). Optionally, the antibody or antigen-binding fragment thereof comprises the VH sequence SEQ ID NO: 188, including one or more post-translational modifications of that sequence. In a particular embodiment, the VH comprises one, two or three CDRs selected from: a. CDR-H1, comprising the amino acid sequence SEQ ID NO: 730, b. CDR-H2, comprising the amino acid sequence SEQ ID NO: 1272, and c. CDR-H3, comprising the amino acid sequence SEQ ID NO: 1814.

[2338] In one aspect, an antibody or antigen-binding fragment thereof is provided, wherein the antibody or antigen-binding fragment thereof comprises a light chain variable domain (VL) having at least 90%, 91%, 92%, 93%, 94%, 95%, 96%, 97%, 98%, 99%, or 100% sequence identity to the amino acid sequence SEQ ID NO: 459. In some embodiments, a VL sequence having at least 90%, 91%, 92%, 93%, 94%, 95%, 96%, 97%, 98%, or 99% identity contains substitutions (e.g., conservative substitutions), insertions, or deletions relative to the reference sequence, but an antibody or antigen-binding fragment thereof comprising that sequence retains the ability to bind to same antigen as the parent (e.g., cancer associated antigen). In some embodiments, a total of 1 to 10 amino acids have been substituted, inserted and/or deleted in the amino acid sequence SEQ ID NO: 459. In some embodiments, the substitutions, insertions, or deletions occur in regions outside the CDRs (e.g., in the FRs). Optionally, the antibody or antigen-binding fragment thereof comprises the VL sequence SEQ ID NO: 459, including one or more post-translational modifications of that sequence. In a particular embodiment, the VL comprises one, two or three CDRs selected from: a. CDR-L1, comprising the amino acid sequence SEQ ID NO: 1001, b. CDR-L2, comprising the amino acid sequence SEQ ID NO: 1543, and c. CDR-L3, comprising the amino acid sequence SEQ ID NO: 2085.

[2339] In one aspect, an antibody or antigen-binding fragment thereof is provided, wherein the antibody or antigen-binding fragment thereof comprises a VH as in any of the embodiments provided above, and a VL as in any of the embodiments provided above. In some embodiments, the antibody or antigen-binding fragment thereof comprises the VH amino acid sequence of SEQ ID NO: 188, and the VL amino acid sequence of SEQ ID NO: 459, optionally including post-translational modifications of those sequences.

### TMEL1034

[2340] In one aspect, the present disclosure provides an antibody or antigen-binding fragment thereof comprising at least one or both variable regions selected from: a. VH comprising the amino acid sequence of SEQ ID NO: 189 and b. VL comprising the amino acid sequence of SEQ ID NO: 460.

[2341] In one aspect, the present disclosure provides an antibody or antigen-binding fragment thereof comprising at least one, two, three, four, five, or six CDRs selected from: a. CDR-H1 comprising the amino acid sequence of SEQ ID NO: 731, b. CDR-H2 comprising the amino acid sequence of SEQ ID NO: 1273, c. CDR-H3 comprising the amino acid sequence of SEQ ID NO: 1815, d. CDR-L1 comprising the amino acid sequence of SEQ ID NO: 1002, e. CDR-L2 comprising the amino acid sequence of SEQ ID NO: 1544, and f. CDR-L3 comprising the amino acid sequence of SEQ ID NO: 2086.

[2342] In one aspect, the present disclosure provides an antibody or antigen-binding fragment thereof comprising a CDR-H3 comprising the amino acid sequence of SEQ ID NO: 1815, and a CDR-L3 comprising the amino acid sequence of SEQ ID NO: 2086.

[2343] In one aspect, the present disclosure provides an antibody or antigen-binding fragment thereof comprising at least one, at least two, or all three VH CDR sequences selected from: a. CDR-H1 comprising the amino acid sequence of SEQ ID NO: 731, b. CDR-H2 comprising the amino acid sequence of SEQ ID NO: 1273, c. CDR-H3 comprising the amino acid sequence of SEQ ID NO: 1815, and a VL comprising the amino acid sequence of SEQ ID NO: 460.

[2344] In one aspect, the present disclosure provides an antibody or antigen-binding fragment thereof comprising at least one, at least two, or all three VL CDR sequences selected from: a. CDR-L1 comprising the amino acid sequence of SEQ ID NO: 1002, b. CDR-L2 comprising the amino acid sequence of SEQ ID NO: 1544, c. CDR-L3 comprising the amino acid sequence of SEQ ID NO: 2086, and a VH comprising the amino acid sequence of SEQ ID NO: 189.

[2345] In one aspect, an antibody or antigen-binding fragment thereof is provided, wherein the antibody or antigen-binding fragment thereof comprises a heavy chain variable domain (VH) having at least 90%, 91%, 92%, 93%, 94%, 95%, 96%, 97%, 98%, 99%, or 100% sequence identity to the amino acid sequence SEQ ID NO: 189. In some embodiments, a VH sequence having at least 90%, 91%, 92%, 93%, 94%, 95%, 96%, 97%, 98%, or 99% identity contains substitutions (e.g., conservative substitutions), insertions, or deletions relative to the reference sequence, but an antibody or antigen-binding fragment thereof comprising that sequence retains the ability to bind to same antigen as of the parent (e.g., cancer associated antigen). In some embodiments, a total of 1 to 10 amino acids have been substituted, inserted and/or deleted in the amino acid sequence SEQ ID NO: 189. In some embodiments, substitutions, insertions, or deletions occur in regions outside the CDRs (e.g., in the FRs). Optionally, the antibody or antigen-binding fragment thereof comprises the VH sequence SEQ ID NO: 189, including one or more post-translational modifications of that sequence. In a particular embodiment, the VH comprises one, two or three CDRs selected from: a. CDR-H1, comprising the amino acid sequence SEQ ID NO: 731, b. CDR-H2, comprising the amino acid sequence SEQ ID NO: 1273, and c. CDR-H3, comprising the amino acid sequence SEQ ID NO: 1815.

[2346] In one aspect, an antibody or antigen-binding fragment thereof is provided, wherein the antibody or antigen-binding fragment thereof comprises a light chain variable domain (VL) having at least 90%, 91%, 92%, 93%, 94%, 95%, 96%, 97%, 98%, 99%, or 100% sequence identity to the amino acid sequence SEQ ID NO: 460. In some embodiments, a VL sequence having at least 90%, 91%, 92%, 93%, 94%, 95%, 96%, 97%, 98%, or 99% identity contains substitutions (e.g., conservative substitutions), insertions, or deletions relative to the reference sequence, but an antibody or antigen-binding fragment thereof comprising that sequence retains the ability to bind to same antigen as the parent (e.g., cancer associated antigen). In some embodiments, a total of 1 to 10 amino acids have been substituted, inserted and/or deleted in the amino acid sequence SEQ ID NO: 460. In some embodiments, the substitutions, insertions, or deletions occur in regions outside the CDRs (e.g., in the FRs). Optionally, the antibody or antigen-binding fragment thereof comprises the VL sequence SEQ ID NO: 460, including one or more post-translational modifications of that sequence. In a particular embodiment, the VL comprises one, two or three CDRs selected from: a. CDR-L1, comprising the amino acid sequence SEQ ID NO: 1002, b. CDR-L2, comprising the amino acid sequence SEQ ID NO: 1544, and c. CDR-L3, comprising the amino acid sequence SEQ ID NO: 2086.

[2347] In one aspect, an antibody or antigen-binding fragment thereof is provided, wherein the antibody or antigen-binding fragment thereof comprises a VH as in any of the embodiments provided above, and a VL as in any of the embodiments provided above. In some embodiments, the antibody or antigen-binding fragment thereof comprises the VH amino acid sequence of SEQ ID NO: 189, and the VL amino acid sequence of SEQ ID NO: 460, optionally including post-translational modifications of those sequences.

### TMEL1035

[2348] In one aspect, the present disclosure provides an antibody or antigen-binding fragment thereof comprising at least one or both variable regions selected from: a. VH comprising the amino acid sequence of SEQ ID NO: 190 and b. VL comprising the amino acid sequence of SEQ ID NO: 461.

[2349] In one aspect, the present disclosure provides an antibody or antigen-binding fragment thereof comprising at least one, two, three, four, five, or six CDRs selected from: a. CDR-H1 comprising the amino acid sequence of SEQ ID NO: 732, b. CDR-H2 comprising the amino acid sequence of SEQ ID NO: 1274, c. CDR-H3 comprising the amino acid sequence of SEQ ID NO: 1816, d. CDR-L1 comprising the amino acid sequence of SEQ ID NO: 1003, e. CDR-L2 comprising the amino acid sequence of SEQ ID NO: 1545, and f. CDR-L3 comprising the amino acid sequence of SEQ ID NO: 2087.

[2350] In one aspect, the present disclosure provides an antibody or antigen-binding fragment thereof comprising a CDR-H3 comprising the amino acid sequence of SEQ ID NO: 1816, and a CDR-L3 comprising the amino acid sequence of SEQ ID NO: 2087.

[2351] In one aspect, the present disclosure provides an antibody or antigen-binding fragment thereof comprising at least one, at least two, or all three VH CDR sequences selected from: a. CDR-H1 comprising the amino acid sequence of SEQ ID NO: 732, b. CDR-H2 comprising the amino acid sequence of SEQ ID NO: 1274, c. CDR-H3 comprising the amino acid sequence of SEQ ID NO: 1816, and a VL comprising the amino acid sequence of SEQ ID NO: 461.

[2352] In one aspect, the present disclosure provides an antibody or antigen-binding fragment thereof comprising at least one, at least two, or all three VL CDR sequences selected from: a. CDR-L1 comprising the amino acid sequence of SEQ ID NO: 1003, b. CDR-L2 comprising the amino acid sequence of SEQ ID NO: 1545, c. CDR-L3 comprising the amino acid sequence of SEQ ID NO: 2087, and a VH comprising the amino acid sequence of SEQ ID NO: 190.

[2353] In one aspect, an antibody or antigen-binding fragment thereof is provided, wherein the antibody or antigen-binding fragment thereof comprises a heavy chain variable domain (VH) having at least 90%, 91%, 92%, 93%, 94%, 95%, 96%, 97%, 98%, 99%, or 100% sequence identity to the amino acid sequence SEQ ID NO: 190. In some embodiments, a VH sequence having at least 90%, 91%, 92%, 93%, 94%, 95%, 96%, 97%, 98%, or 99% identity contains substitutions (e.g., conservative substitutions), insertions, or deletions relative to the reference sequence, but an antibody or antigen-binding fragment thereof comprising that sequence retains the ability to bind to same antigen as of the parent (e.g., cancer associated antigen). In some embodiments, a total of 1 to 10 amino acids have been substituted, inserted and/or deleted in the amino acid sequence SEQ ID NO: 190. In some embodiments, substitutions, insertions, or deletions occur in regions outside the CDRs (e.g., in the FRs). Optionally, the antibody or antigen-binding fragment thereof comprises the VH sequence SEQ ID NO: 190, including one or more post-translational modifications of that sequence. In a particular embodiment, the VH comprises one, two or three CDRs selected from: a. CDR-H1, comprising the amino acid sequence SEQ ID NO: 732, b. CDR-H2, comprising the amino acid sequence SEQ ID NO: 1274, and c. CDR-H3, comprising the amino acid sequence SEQ ID NO: 1816.

[2354] In one aspect, an antibody or antigen-binding fragment thereof is provided, wherein the antibody or antigen-binding fragment thereof comprises a light chain variable domain (VL) having at least 90%, 91%, 92%, 93%, 94%, 95%, 96%, 97%, 98%, 99%, or 100% sequence identity to the amino acid sequence SEQ ID NO: 461. In some embodiments, a VL sequence having at least 90%, 91%, 92%, 93%, 94%, 95%, 96%, 97%, 98%, or 99% identity contains substitutions (e.g., conservative substitutions), insertions, or deletions relative to the reference sequence, but an antibody or antigen-binding fragment thereof comprising that sequence retains the ability to bind to same antigen as the parent (e.g., cancer associated antigen). In some embodiments, a total of 1 to 10 amino acids have been substituted, inserted and/or deleted in the amino acid sequence SEQ ID NO: 461. In some embodiments, the substitutions, insertions, or deletions occur in regions outside the CDRs (e.g., in the FRs). Optionally, the antibody or antigen-binding fragment thereof comprises the VL sequence SEQ ID NO: 461, including one or more post-translational modifications of that sequence. In a particular embodiment, the VL comprises one, two or three CDRs selected from: a. CDR-L1, comprising the amino acid sequence SEQ ID NO: 1003, b. CDR-L2, comprising the amino acid sequence SEQ ID NO: 1545, and c. CDR-L3, comprising the amino acid sequence SEQ ID NO: 2087.

[2355] In one aspect, an antibody or antigen-binding fragment thereof is provided, wherein the antibody or antigen-binding fragment thereof comprises a VH as in any of the embodiments provided above, and a VL as in any of the embodiments provided above. In some embodiments, the antibody or antigen-binding fragment thereof comprises the VH amino acid sequence of SEQ ID NO: 190, and the VL amino acid sequence of SEQ ID NO: 461, optionally including post-translational modifications of those sequences.

### TMEL1036

[2356] In one aspect, the present disclosure provides an antibody or antigen-binding fragment thereof comprising at least one or both variable regions selected from: a. VH comprising the amino acid sequence of SEQ ID NO: 191 and b. VL comprising the amino acid sequence of SEQ ID NO: 462.

[2357] In one aspect, the present disclosure provides an antibody or antigen-binding fragment thereof comprising at least one, two, three, four, five, or six CDRs selected from: a. CDR-H1 comprising the amino acid sequence of SEQ ID NO: 733, b. CDR-H2 comprising the amino acid sequence of SEQ ID NO: 1275, c. CDR-H3 comprising the amino acid sequence of SEQ ID NO: 1817, d. CDR-L1 comprising the amino acid sequence of SEQ ID NO: 1004, e. CDR-L2 comprising the amino acid sequence of SEQ ID NO: 1546, and f. CDR-L3 comprising the amino acid sequence of SEQ ID NO: 2088.

[2358] In one aspect, the present disclosure provides an antibody or antigen-binding fragment thereof comprising a CDR-H3 comprising the amino acid sequence of SEQ ID NO: 1817, and a CDR-L3 comprising the amino acid sequence of SEQ ID NO: 2088.

[2359] In one aspect, the present disclosure provides an antibody or antigen-binding fragment thereof comprising at least one, at least two, or all three VH CDR sequences selected from: a. CDR-H1 comprising the amino acid sequence of SEQ ID NO: 733, b. CDR-H2 comprising the amino acid sequence of SEQ ID NO: 1275, c. CDR-H3 comprising the amino acid sequence of SEQ ID NO: 1817, and a VL comprising the amino acid sequence of SEQ ID NO: 462.

[2360] In one aspect, the present disclosure provides an antibody or antigen-binding fragment thereof comprising at least one, at least two, or all three VL CDR sequences selected from: a CDR-L1 comprising the amino acid sequence of SEQ ID NO: 1004, b CDR-L2 comprising the amino acid sequence of SEQ ID NO: 1546, c. CDR-L3 comprising the amino acid sequence of SEQ ID NO: 2088, and a VH comprising the amino acid sequence of SEQ ID NO: 191.

[2361] In one aspect, an antibody or antigen-binding fragment thereof is provided, wherein the antibody or antigen-binding fragment thereof comprises a heavy chain variable domain (VH) having at least 90%, 91%, 92%, 93%, 94%, 95%, 96%, 97%, 98%, 99%, or 100% sequence identity to the amino acid sequence SEQ ID NO: 191. In some embodiments, a VH sequence having at least 90%, 91%, 92%, 93%, 94%, 95%, 96%, 97%, 98%, or 99% identity contains substitutions (e.g., conservative substitutions), insertions, or deletions relative to the reference sequence, but an antibody or antigen-binding fragment thereof comprising that sequence retains the ability to bind to same antigen as of the parent (e.g., cancer associated antigen). In some embodiments, a total of 1 to 10 amino acids have been substituted, inserted and/or deleted in the amino acid sequence SEQ ID NO: 191. In some embodiments, substitutions, insertions, or deletions occur in regions outside the CDRs (e.g., in the FRs). Optionally, the antibody or antigen-binding fragment thereof comprises the VH sequence SEQ ID NO: 191, including one or more post-translational modifications of that sequence. In a particular embodiment, the VH comprises one, two or three CDRs selected from: a. CDR-H1, comprising the amino acid sequence SEQ ID NO: 733, b. CDR-H2, comprising the amino acid sequence SEQ ID NO: 1275, and c. CDR-H3, comprising the amino acid sequence SEQ ID NO: 1817.

[2362] In one aspect, an antibody or antigen-binding fragment thereof is provided, wherein the antibody or antigen-binding fragment thereof comprises a light chain variable domain (VL) having at least 90%, 91%, 92%, 93%, 94%, 95%, 96%, 97%, 98%, 99%, or 100% sequence identity to the amino acid sequence SEQ ID NO: 462. In some embodiments, a VL sequence having at least 90%, 91%, 92%, 93%, 94%, 95%, 96%, 97%, 98%, or 99% identity contains substitutions (e.g., conservative substitutions), insertions, or deletions relative to the reference sequence, but an antibody or antigen-binding fragment thereof comprising that sequence retains the ability to bind to same antigen as the parent (e.g., cancer associated antigen). In some embodiments, a total of 1 to 10 amino acids have been substituted, inserted and/or deleted in the amino acid sequence SEQ ID NO: 462. In some embodiments, the substitutions, insertions, or deletions occur in regions outside the CDRs (e.g., in the FRs). Optionally, the antibody or antigen-binding fragment thereof comprises the VL sequence SEQ ID NO: 462, including one or more post-translational modifications of that sequence. In a particular embodiment, the VL comprises one, two or three CDRs selected from: a. CDR-L1, comprising the amino acid sequence SEQ ID NO: 1004, b. CDR-L2, comprising the amino acid sequence SEQ ID NO: 1546, and c. CDR-L3, comprising the amino acid sequence SEQ ID NO: 2088.

[2363] In one aspect, an antibody or antigen-binding fragment thereof is provided, wherein the antibody or antigen-binding fragment thereof comprises a VH as in any of the embodiments provided above, and a VL as in any of the embodiments provided above. In some embodiments, the antibody or antigen-binding fragment thereof comprises the VH amino acid sequence of SEQ ID NO: 191, and the VL amino acid sequence of SEQ ID NO: 462, optionally including post-translational modifications of those sequences.

### TMEL1037

[2364] In one aspect, the present disclosure provides an antibody or antigen-binding fragment thereof comprising at least one or both variable regions selected from: a. VH comprising the amino acid sequence of SEQ ID NO: 192 and b. VL comprising the amino acid sequence of SEQ ID NO: 463.

[2365] In one aspect, the present disclosure provides an antibody or antigen-binding fragment thereof comprising at least one, two, three, four, five, or six CDRs selected from: a. CDR-H1 comprising the amino acid sequence of SEQ ID NO: 734, b. CDR-H2 comprising the amino acid sequence of SEQ ID NO: 1276, c. CDR-H3 comprising the amino acid sequence of SEQ ID NO: 1818, d. CDR-L1 comprising the amino acid sequence of SEQ ID NO: 1005, e. CDR-L2 comprising the amino acid sequence of SEQ ID NO: 1547, and f. CDR-L3 comprising the amino acid sequence of SEQ ID NO: 2089.

[2366] In one aspect, the present disclosure provides an antibody or antigen-binding fragment thereof comprising a CDR-H3 comprising the amino acid sequence of SEQ ID NO: 1818, and a CDR-L3 comprising the amino acid sequence of SEQ ID NO: 2089.

[2367] In one aspect, the present disclosure provides an antibody or antigen-binding fragment thereof comprising at least one, at least two, or all three VH CDR sequences selected from: a. CDR-H1 comprising the amino acid sequence of SEQ ID NO: 734, b. CDR-H2 comprising the amino acid sequence of SEQ ID NO: 1276, c. CDR-H3 comprising the amino acid sequence of SEQ ID NO: 1818, and d. VL comprising the amino acid sequence of SEQ ID NO: 463.

[2368] In one aspect, the present disclosure provides an antibody or antigen-binding fragment thereof comprising at least one, at least two, or all three VL CDR sequences selected from: a. CDR-L1 comprising the amino acid sequence of SEQ ID NO: 1005, b. CDR-L2 comprising the amino acid sequence of SEQ ID NO: 1547, c. CDR-L3 comprising the amino acid sequence of SEQ ID NO: 2089, and a VH comprising the amino acid sequence of SEQ ID NO: 192.

[2369] In one aspect, an antibody or antigen-binding fragment thereof is provided, wherein the antibody or antigen-binding fragment thereof comprises a heavy chain variable domain (VH) having at least 90%, 91%, 92%, 93%, 94%, 95%, 96%, 97%, 98%, 99%, or 100% sequence identity to the amino acid sequence SEQ ID NO: 192. In some embodiments, a VH sequence having at least 90%, 91%, 92%, 93%, 94%, 95%, 96%, 97%, 98%, or 99% identity contains substitutions (e.g., conservative substitutions), insertions, or deletions relative to the reference sequence, but an antibody or antigen-binding fragment thereof comprising that sequence retains the ability to bind to same antigen as of the parent (e.g., cancer associated antigen). In some embodiments, a total of 1 to 10 amino acids have been substituted, inserted and/or deleted in the amino acid sequence SEQ ID NO: 192. In some embodiments, substitutions, insertions, or deletions occur in regions outside the CDRs (e.g., in the FRs). Optionally, the antibody or antigen-binding fragment thereof comprises the VH sequence SEQ ID NO: 192, including one or more post-translational modifications of that sequence. In a particular embodiment, the VH comprises one, two or three CDRs selected from: a. CDR-H1, comprising the amino acid sequence SEQ ID NO: 734, b. CDR-H2, comprising the amino acid sequence SEQ ID NO: 1276, and c. CDR-H3, comprising the amino acid sequence SEQ ID NO: 1818.

[2370] In one aspect, an antibody or antigen-binding fragment thereof is provided, wherein the antibody or antigen-binding fragment thereof comprises a light chain variable domain (VL) having at least 90%, 91%, 92%, 93%, 94%, 95%, 96%, 97%, 98%, 99%, or 100% sequence identity to the amino acid sequence SEQ ID NO: 463. In some embodiments, a VL sequence having at least 90%, 91%, 92%, 93%, 94%, 95%, 96%, 97%, 98%, or 99% identity contains substitutions (e.g., conservative substitutions), insertions, or deletions relative to the reference sequence, but an antibody or antigen-binding fragment thereof comprising that sequence retains the ability to bind to same antigen as the parent (e.g., cancer associated antigen). In some embodiments, a total of 1 to 10 amino acids have been substituted, inserted and/or deleted in the amino acid sequence SEQ ID NO: 463. In some embodiments, the substitutions, insertions, or deletions occur in regions outside the CDRs (e.g., in the FRs). Optionally, the antibody or antigen-binding fragment thereof comprises the VL sequence SEQ ID NO: 463, including one or more post-translational modifications of that sequence. In a particular embodiment, the VL comprises one, two or three CDRs selected from: a. CDR-L1, comprising the amino acid sequence SEQ ID NO: 1005, b. CDR-L2, comprising the amino acid sequence SEQ ID NO: 1547, and c. CDR-L3, comprising the amino acid sequence SEQ ID NO: 2089.

[2371] In one aspect, an antibody or antigen-binding fragment thereof is provided, wherein the antibody or antigen-binding fragment thereof comprises a VH as in any of the embodiments provided above, and a VL as in any of the embodiments provided above. In some embodiments, the antibody or antigen-binding fragment thereof comprises the VH amino acid sequence of SEQ ID NO: 192, and the VL amino acid sequence of SEQ ID NO: 463, optionally including post-translational modifications of those sequences.

### TMEL1038

[2372] In one aspect, the present disclosure provides an antibody or antigen-binding fragment thereof comprising at least one or both variable regions selected from: a. VH comprising the amino acid sequence of SEQ ID NO: 193 and b. VL comprising the amino acid sequence of SEQ ID NO: 464.

[2373] In one aspect, the present disclosure provides an antibody or antigen-binding fragment thereof comprising at least one, two, three, four, five, or six CDRs selected from: a. CDR-H1 comprising the amino acid sequence of SEQ ID NO: 735, b. CDR-H2 comprising the amino acid sequence of SEQ ID NO: 1277, c. CDR-H3 comprising the amino acid sequence of SEQ ID NO: 1819, d. CDR-L1 comprising the amino acid sequence of SEQ ID NO: 1006, e. CDR-L2 comprising the amino acid sequence of SEQ ID NO: 1548, and f. CDR-L3 comprising the amino acid sequence of SEQ ID NO: 2090.

[2374] In one aspect, the present disclosure provides an antibody or antigen-binding fragment thereof comprising a CDR-H3 comprising the amino acid sequence of SEQ ID NO: 1819, and a CDR-L3 comprising the amino acid sequence of SEQ ID NO: 2090.

[2375] In one aspect, the present disclosure provides an antibody or antigen-binding fragment thereof comprising at least one, at least two, or all three VH CDR sequences selected from: a. CDR-H1 comprising the amino acid sequence of SEQ ID NO: 735, b. CDR-H2 comprising the amino acid sequence of SEQ ID NO: 1277, c. CDR-H3 comprising the amino acid sequence of SEQ ID NO: 1819, and a VL comprising the amino acid sequence of SEQ ID NO: 464.

[2376] In one aspect, the present disclosure provides an antibody or antigen-binding fragment thereof comprising at least one, at least two, or all three VL CDR sequences selected from: a. CDR-L1 comprising the amino acid sequence of SEQ ID NO: 1006, b. CDR-L2 comprising the amino acid sequence of SEQ ID NO: 1548, c. CDR-L3 comprising the amino acid sequence of SEQ ID NO: 2090, and a VH comprising the amino acid sequence of SEQ ID NO: 193.

[2377] In one aspect, an antibody or antigen-binding fragment thereof is provided, wherein the antibody or antigen-binding fragment thereof comprises a heavy chain variable domain (VH) having at least 90%, 91%, 92%, 93%, 94%, 95%, 96%, 97%, 98%, 99%, or 100% sequence identity to the amino acid sequence SEQ ID NO: 193. In some embodiments, a VH sequence having at least 90%, 91%, 92%, 93%, 94%, 95%, 96%, 97%, 98%, or 99% identity contains substitutions (e.g., conservative substitutions), insertions, or deletions relative to the reference sequence, but an antibody or antigen-binding fragment thereof comprising that sequence retains the ability to bind to same antigen as of the parent (e.g., cancer associated antigen). In some embodiments, a total of 1 to 10 amino acids have been substituted, inserted and/or deleted in the amino acid sequence SEQ ID NO: 193. In some embodiments, substitutions, insertions, or deletions occur in regions outside the CDRs (e.g., in the FRs). Optionally, the antibody or antigen-binding fragment thereof comprises the VH sequence SEQ ID NO: 193, including one or more post-translational modifications of that sequence. In a particular embodiment, the VH comprises one, two or three CDRs selected from: a. CDR-H1, comprising the amino acid sequence SEQ ID NO: 735, b. CDR-H2, comprising the amino acid sequence SEQ ID NO: 1277, and c. CDR-H3, comprising the amino acid sequence SEQ ID NO: 1819.

[2378] In one aspect, an antibody or antigen-binding fragment thereof is provided, wherein the antibody or antigen-binding fragment thereof comprises a light chain variable domain (VL) having at least 90%, 91%, 92%, 93%, 94%, 95%, 96%, 97%, 98%, 99%, or 100% sequence identity to the amino acid sequence SEQ ID NO: 464. In some embodiments, a VL sequence having at least 90%, 91%, 92%, 93%, 94%, 95%, 96%, 97%, 98%, or 99% identity contains substitutions (e.g., conservative substitutions), insertions, or deletions relative to the reference sequence, but an antibody or antigen-binding fragment thereof comprising that sequence retains the ability to bind to same antigen as the parent (e.g., cancer associated antigen). In some embodiments, a total of 1 to 10 amino acids have been substituted, inserted and/or deleted in the amino acid sequence SEQ ID NO: 464. In some embodiments, the substitutions, insertions, or deletions occur in regions outside the CDRs (e.g., in the FRs). Optionally, the antibody or antigen-binding fragment thereof comprises the VL sequence SEQ ID NO: 464, including one or more post-translational modifications of that sequence. In a particular embodiment, the VL comprises one, two or three CDRs selected from: a. CDR-L1, comprising the amino acid sequence SEQ ID NO: 1006, b. CDR-L2, comprising the amino acid sequence SEQ ID NO: 1548, and c. CDR-L3, comprising the amino acid sequence SEQ ID NO: 2090.

[2379] In one aspect, an antibody or antigen-binding fragment thereof is provided, wherein the antibody or antigen-binding fragment thereof comprises a VH as in any of the embodiments provided above, and a VL as in any of the embodiments provided above. In some embodiments, the antibody or antigen-binding fragment thereof comprises the VH amino acid sequence of SEQ ID NO: 193, and the VL amino acid sequence of SEQ ID NO: 464, optionally including post-translational modifications of those sequences.

### TMEL1039

[2380] In one aspect, the present disclosure provides an antibody or antigen-binding fragment thereof comprising at least one or both variable regions selected from: a. VH comprising the amino acid sequence of SEQ ID NO: 194 and b. VL comprising the amino acid sequence of SEQ ID NO: 465.

[2381] In one aspect, the present disclosure provides an antibody or antigen-binding fragment thereof comprising at least one, two, three, four, five, or six CDRs selected from: a. CDR-H1 comprising the amino acid sequence of SEQ ID NO: 736, b. CDR-H2 comprising the amino acid sequence of SEQ ID NO: 1278, c. CDR-H3 comprising the amino acid sequence of SEQ ID NO: 1820, d. CDR-L1 comprising the amino acid sequence of SEQ ID NO: 1007, e. CDR-L2 comprising the amino acid sequence of SEQ ID NO: 1549, and f. CDR-L3 comprising the amino acid sequence of SEQ ID NO: 2091.

[2382] In one aspect, the present disclosure provides an antibody or antigen-binding fragment thereof comprising a CDR-H3 comprising the amino acid sequence of SEQ ID NO: 1820, and a CDR-L3 comprising the amino acid sequence of SEQ ID NO: 2091.

[2383] In one aspect, the present disclosure provides an antibody or antigen-binding fragment thereof comprising at least one, at least two, or all three VH CDR sequences selected from: a. CDR-H1 comprising the amino acid sequence of SEQ ID NO: 736, b. CDR-H2 comprising the amino acid sequence of SEQ ID NO: 1278, c. CDR-H3 comprising the amino acid sequence of SEQ ID NO: 1820, and a VL comprising the amino acid sequence of SEQ ID NO: 465.

[2384] In one aspect, the present disclosure provides an antibody or antigen-binding fragment thereof comprising at least one, at least two, or all three VL CDR sequences selected from: a. CDR-L1 comprising the amino acid sequence of SEQ ID NO: 1007, b. CDR-L2 comprising the amino acid sequence of SEQ ID NO: 1549, c. CDR-L3 comprising the amino acid sequence of SEQ ID NO: 2091, and a VH comprising the amino acid sequence of SEQ ID NO: 194.

[2385] In one aspect, an antibody or antigen-binding fragment thereof is provided, wherein the antibody or antigen-binding fragment thereof comprises a heavy chain variable domain (VH) having at least 90%, 91%, 92%, 93%, 94%, 95%, 96%, 97%, 98%, 99%, or 100% sequence identity to the amino acid sequence SEQ ID NO: 194. In some embodiments, a VH sequence having at least 90%, 91%, 92%, 93%, 94%, 95%, 96%, 97%, 98%, or 99% identity contains substitutions (e.g., conservative substitutions), insertions, or deletions relative to the reference sequence, but an antibody or antigen-binding fragment thereof comprising that sequence retains the ability to bind to same antigen as of the parent (e.g., cancer associated antigen). In some embodiments, a total of 1 to 10 amino acids have been substituted, inserted and/or deleted in the amino acid sequence SEQ ID NO: 194. In some embodiments, substitutions, insertions, or deletions occur in regions outside the CDRs (e.g., in the FRs). Optionally, the antibody or antigen-binding fragment thereof comprises the VH sequence SEQ ID NO: 194, including one or more post-translational modifications of that sequence. In a particular embodiment, the VH comprises one, two or three CDRs selected from: CDR-H1, comprising the amino acid sequence SEQ ID NO: 736, b. CDR-H2, comprising the amino acid sequence SEQ ID NO: 1278, and c. CDR-H3, comprising the amino acid sequence SEQ ID NO: 1820.

[2386] In one aspect, an antibody or antigen-binding fragment thereof is provided, wherein the antibody or antigen-binding fragment thereof comprises a light chain variable domain (VL) having at least 90%, 91%, 92%, 93%, 94%, 95%, 96%, 97%, 98%, 99%, or 100% sequence identity to the amino acid sequence SEQ ID NO: 465. In some embodiments, a VL sequence having at least 90%, 91%, 92%, 93%, 94%, 95%, 96%, 97%, 98%, or 99% identity contains substitutions (e.g., conservative substitutions), insertions, or deletions relative to the reference sequence, but an antibody or antigen-binding fragment thereof comprising that sequence retains the ability to bind to same antigen as the parent (e.g., cancer associated antigen). In some embodiments, a total of 1 to 10 amino acids have been substituted, inserted and/or deleted in the amino acid sequence SEQ ID NO: 465. In some embodiments, the substitutions, insertions, or deletions occur in regions outside the CDRs (e.g., in the FRs). Optionally, the antibody or antigen-binding fragment thereof comprises the VL sequence SEQ ID NO: 465, including one or more post-translational modifications of that sequence. In a particular embodiment, the VL comprises one, two or three CDRs selected from: a. CDR-L1, comprising the amino acid sequence SEQ ID NO: 1007, b. CDR-L2, comprising the amino acid sequence SEQ ID NO: 1549, and c. CDR-L3, comprising the amino acid sequence SEQ ID NO: 2091.

[2387] In one aspect, an antibody or antigen-binding fragment thereof is provided, wherein the antibody or antigen-binding fragment thereof comprises a VH as in any of the embodiments provided above, and a VL as in any of the embodiments provided above. In some embodiments, the antibody or antigen-binding fragment thereof comprises the VH amino acid sequence of SEQ ID NO: 194, and the VL amino acid sequence of SEQ ID NO: 465, optionally including post-translational modifications of those sequences.

### TMEL1040

[2388] In one aspect, the present disclosure provides an antibody or antigen-binding fragment thereof comprising at least one or both variable regions selected from: a. VH comprising the amino acid sequence of SEQ ID NO: 195 and b. VL comprising the amino acid sequence of SEQ ID NO: 466.

[2389] In one aspect, the present disclosure provides an antibody or antigen-binding fragment thereof comprising at least one, two, three, four, five, or six CDRs selected from: a. CDR-H1 comprising the amino acid sequence of SEQ ID NO: 737, b. CDR-H2 comprising the amino acid sequence of SEQ ID NO: 1279, c. CDR-H3 comprising the amino acid sequence of SEQ ID NO: 1821, d. CDR-L1 comprising the amino acid sequence of SEQ ID NO: 1008, e. CDR-L2 comprising the amino acid sequence of SEQ ID NO: 1550, and f. CDR-L3 comprising the amino acid sequence of SEQ ID NO: 2092.

[2390] In one aspect, the present disclosure provides an antibody or antigen-binding fragment thereof comprising a CDR-H3 comprising the amino acid sequence of SEQ ID NO: 1821, and a CDR-L3 comprising the amino acid sequence of SEQ ID NO: 2092.

[2391] In one aspect, the present disclosure provides an antibody or antigen-binding fragment thereof comprising at least one, at least two, or all three VH CDR sequences selected from: a. CDR-H1 comprising the amino acid sequence of SEQ ID NO: 737, b. CDR-H2 comprising the amino acid sequence of SEQ ID NO: 1279, c. CDR-H3 comprising the amino acid sequence of SEQ ID NO: 1821, and a VL comprising the amino acid sequence of SEQ ID NO: 466.

[2392] In one aspect, the present disclosure provides an antibody or antigen-binding fragment thereof comprising at least one, at least two, or all three VL CDR sequences selected from: a. CDR-L1 comprising the amino acid sequence of SEQ ID NO: 1008, b. CDR-L2 comprising the amino acid sequence of SEQ ID NO: 1550, c. CDR-L3 comprising the amino acid sequence of SEQ ID NO: 2092, and a VH comprising the amino acid sequence of SEQ ID NO: 195.

[2393] In one aspect, an antibody or antigen-binding fragment thereof is provided, wherein the antibody or antigen-binding fragment thereof comprises a heavy chain variable domain (VH) having at least 90%, 91%, 92%, 93%, 94%, 95%, 96%, 97%, 98%, 99%, or 100% sequence identity to the amino acid sequence SEQ ID NO: 195. In some embodiments, a VH sequence having at least 90%, 91%, 92%, 93%, 94%, 95%, 96%, 97%, 98%, or 99% identity contains substitutions (e.g., conservative substitutions), insertions, or deletions relative to the reference sequence, but an antibody or antigen-binding fragment thereof comprising that sequence retains the ability to bind to same antigen as of the parent (e.g., cancer associated antigen). In some embodiments, a total of 1 to 10 amino acids have been substituted, inserted and/or deleted in the amino acid sequence SEQ ID NO: 195. In some embodiments, substitutions, insertions, or deletions occur in regions outside the CDRs (e.g., in the FRs). Optionally, the antibody or antigen-binding fragment thereof comprises the VH sequence SEQ ID NO: 195, including one or more post-translational modifications of that sequence. In a particular embodiment, the VH comprises one, two or three CDRs selected from: a. CDR-H1, comprising the amino acid sequence SEQ ID NO: 737, b. CDR-H2, comprising the amino acid sequence SEQ ID NO: 1279, and c. CDR-H3, comprising the amino acid sequence SEQ ID NO: 1821.

[2394] In one aspect, an antibody or antigen-binding fragment thereof is provided, wherein the antibody or antigen-binding fragment thereof comprises a light chain variable domain (VL) having at least 90%, 91%, 92%, 93%, 94%, 95%, 96%, 97%, 98%, 99%, or 100% sequence identity to the amino acid sequence SEQ ID NO: 466. In some embodiments, a VL sequence having at least 90%, 91%, 92%, 93%, 94%, 95%, 96%, 97%, 98%, or 99% identity contains substitutions (e.g., conservative substitutions), insertions, or deletions relative to the reference sequence, but an antibody or antigen-binding fragment thereof comprising that sequence retains the ability to bind to same antigen as the parent (e.g., cancer associated antigen). In some embodiments, a total of 1 to 10 amino acids have been substituted, inserted and/or deleted in the amino acid sequence SEQ ID NO: 466. In some embodiments, the substitutions, insertions, or deletions occur in regions outside the CDRs (e.g., in the FRs). Optionally, the antibody or antigen-binding fragment thereof comprises the VL sequence SEQ ID NO: 466, including one or more post-translational modifications of that sequence. In a particular embodiment, the VL comprises one, two or three CDRs selected from: a. CDR-L1, comprising the amino acid sequence SEQ ID NO: 1008, b. CDR-L2, comprising the amino acid sequence SEQ ID NO: 1550, and c. CDR-L3, comprising the amino acid sequence SEQ ID NO: 2092.

[2395] In one aspect, an antibody or antigen-binding fragment thereof is provided, wherein the antibody or antigen-binding fragment thereof comprises a VH as in any of the embodiments provided above, and a VL as in any of the embodiments provided above. In some embodiments, the antibody or antigen-binding fragment thereof comprises the VH amino acid sequence of SEQ ID NO: 195, and the VL amino acid sequence of SEQ ID NO: 466, optionally including post-translational modifications of those sequences.

### TMEL1041

[2396] In one aspect, the present disclosure provides an antibody or antigen-binding fragment thereof comprising at least one or both variable regions selected from: a. VH comprising the amino acid sequence of SEQ ID NO: 196 and b. VL comprising the amino acid sequence of SEQ ID NO: 467.

[2397] In one aspect, the present disclosure provides an antibody or antigen-binding fragment thereof comprising at least one, two, three, four, five, or six CDRs selected from: a. CDR-H1 comprising the amino acid sequence of SEQ ID NO: 738, b. CDR-H2 comprising the amino acid sequence of SEQ ID NO: 1280, c. CDR-H3 comprising the amino acid sequence of SEQ ID NO: 1822, d. CDR-L1 comprising the amino acid sequence of SEQ ID NO: 1009, e. CDR-L2 comprising the amino acid sequence of SEQ ID NO: 1551, and f. CDR-L3 comprising the amino acid sequence of SEQ ID NO: 2093.

[2398] In one aspect, the present disclosure provides an antibody or antigen-binding fragment thereof comprising a CDR-H3 comprising the amino acid sequence of SEQ ID NO: 1822, and a CDR-L3 comprising the amino acid sequence of SEQ ID NO: 2093.

[2399] In one aspect, the present disclosure provides an antibody or antigen-binding fragment thereof comprising at least one, at least two, or all three VH CDR sequences selected from: a. CDR-H1 comprising the amino acid sequence of SEQ ID NO: 738, b. CDR-H2 comprising the amino acid sequence of SEQ ID NO: 1280, c. CDR-H3 comprising the amino acid sequence of SEQ ID NO: 1822, and a VL comprising the amino acid sequence of SEQ ID NO: 467.

[2400] In one aspect, the present disclosure provides an antibody or antigen-binding fragment thereof comprising at least one, at least two, or all three VL CDR sequences selected from: a. CDR-L1 comprising the amino acid sequence of SEQ ID NO: 1009, b. CDR-L2 comprising the amino acid sequence of SEQ ID NO: 1551, c. CDR-L3 comprising the amino acid sequence of SEQ ID NO: 2093, and a VH comprising the amino acid sequence of SEQ ID NO: 196.

[2401] In one aspect, an antibody or antigen-binding fragment thereof is provided, wherein the antibody or antigen-binding fragment thereof comprises a heavy chain variable domain (VH) having at least 90%, 91%, 92%, 93%, 94%, 95%, 96%, 97%, 98%, 99%, or 100% sequence identity to the amino acid sequence SEQ ID NO: 196. In some embodiments, a VH sequence having at least 90%, 91%, 92%, 93%, 94%, 95%, 96%, 97%, 98%, or 99% identity contains substitutions (e.g., conservative substitutions), insertions, or deletions relative to the reference sequence, but an antibody or antigen-binding fragment thereof comprising that sequence retains the ability to bind to same antigen as of the parent (e.g., cancer associated antigen). In some embodiments, a total of 1 to 10 amino acids have been substituted, inserted and/or deleted in the amino acid sequence SEQ ID NO: 196. In some embodiments, substitutions, insertions, or deletions occur in regions outside the CDRs (e.g., in the FRs). Optionally, the antibody or antigen-binding fragment thereof comprises the VH sequence SEQ ID NO: 196, including one or more post-translational modifications of that sequence. In a particular embodiment, the VH comprises one, two or three CDRs selected from: a. CDR-H1, comprising the amino acid sequence SEQ ID NO: 738, b. CDR-H2, comprising the amino acid sequence SEQ ID NO: 1280, and c. CDR-H3, comprising the amino acid sequence SEQ ID NO: 1822.

[2402] In one aspect, an antibody or antigen-binding fragment thereof is provided, wherein the antibody or antigen-binding fragment thereof comprises a light chain variable domain (VL) having at least 90%, 91%, 92%, 93%, 94%, 95%, 96%, 97%, 98%, 99%, or 100% sequence identity to the amino acid sequence SEQ ID NO: 467. In some embodiments, a VL sequence having at least 90%, 91%, 92%, 93%, 94%, 95%, 96%, 97%, 98%, or 99% identity contains substitutions (e.g., conservative substitutions), insertions, or deletions relative to the reference sequence, but an antibody or antigen-binding fragment thereof comprising that sequence retains the ability to bind to same antigen as the parent (e.g., cancer associated antigen). In some embodiments, a total of 1 to 10 amino acids have been substituted, inserted and/or deleted in the amino acid sequence SEQ ID NO: 467. In some embodiments, the substitutions, insertions, or deletions occur in regions outside the CDRs (e.g., in the FRs). Optionally, the antibody or antigen-binding fragment thereof comprises the VL sequence SEQ ID NO: 467, including one or more post-translational modifications of that sequence. In a particular embodiment, the VL comprises one, two or three CDRs selected from: a. CDR-L1, comprising the amino acid sequence SEQ ID NO: 1009, b. CDR-L2, comprising the amino acid sequence SEQ ID NO: 1551, and a. CDR-L3, comprising the amino acid sequence SEQ ID NO: 2093.

[2403] In one aspect, an antibody or antigen-binding fragment thereof is provided, wherein the antibody or antigen-binding fragment thereof comprises a VH as in any of the embodiments provided above, and a VL as in any of the embodiments provided above. In some embodiments, the antibody or antigen-binding fragment thereof comprises the VH amino acid sequence of SEQ ID NO: 196, and the VL amino acid sequence of SEQ ID NO: 467, optionally including post-translational modifications of those sequences.

### TMES1001

[2404] In one aspect, the present disclosure provides an antibody or antigen-binding fragment thereof comprising at least one or both variable regions selected from: a. VH comprising the amino acid sequence of SEQ ID NO: 197 and b. VL comprising the amino acid sequence of SEQ ID NO: 468.

[2405] In one aspect, the present disclosure provides an antibody or antigen-binding fragment thereof comprising at least one, two, three, four, five, or six CDRs selected from: a. CDR-H1 comprising the amino acid sequence of SEQ ID NO: 739, b. CDR-H2 comprising the amino acid sequence of SEQ ID NO: 1281, c. CDR-H3 comprising the amino acid sequence of SEQ ID NO: 1823, d. CDR-L1 comprising the amino acid sequence of SEQ ID NO: 1010, e. CDR-L2 comprising the amino acid sequence of SEQ ID NO: 1552, and f. CDR-L3 comprising the amino acid sequence of SEQ ID NO: 2094.

[2406] In one aspect, the present disclosure provides an antibody or antigen-binding fragment thereof comprising a CDR-H3 comprising the amino acid sequence of SEQ ID NO: 1823 and a CDR-L3 comprising the amino acid sequence of SEQ ID NO: 2094.

[2407] In one aspect, the present disclosure provides an antibody or antigen-binding fragment thereof comprising at least one, at least two, or all three VH CDR sequences selected from: a. CDR-H1 comprising the amino acid sequence of SEQ ID NO: 739, b. CDR-H2 comprising the amino acid sequence of SEQ ID NO: 1281, c. CDR-H3 comprising the amino acid sequence of SEQ ID NO: 1823, and a VL comprising the amino acid sequence of SEQ ID NO: 468.

[2408] In one aspect, the present disclosure provides an antibody or antigen-binding fragment thereof comprising at least one, at least two, or all three VL CDR sequences selected from: a. CDR-L1 comprising the amino acid sequence of SEQ ID NO: 1010, b. CDR-L2 comprising the amino acid sequence of SEQ ID NO: 1552, c. CDR-L3 comprising the amino acid sequence of SEQ ID NO: 2094, and a VH comprising the amino acid sequence of SEQ ID NO: 197.

[2409] In one aspect, an antibody or antigen-binding fragment thereof is provided, wherein the antibody or antigen-binding fragment thereof comprises a heavy chain variable domain (VH) having at least 90%, 91%, 92%, 93%, 94%, 95%, 96%, 97%, 98%, 99%, or 100% sequence identity to the amino acid sequence SEQ ID NO: 197. In some embodiments, a VH sequence having at least 90%, 91%, 92%, 93%, 94%, 95%, 96%, 97%, 98%, or 99% identity contains substitutions (e.g., conservative substitutions), insertions, or deletions relative to the reference sequence, but an antibody or antigen-binding fragment thereof comprising that sequence retains the ability to bind to same antigen as of the parent (e.g., cancer associated antigen). In some embodiments, a total of 1 to 10 amino acids have been substituted, inserted and/or deleted in the amino acid sequence SEQ ID NO: 197. In some embodiments, substitutions, insertions, or deletions occur in regions outside the CDRs (e.g., in the FRs). Optionally, the antibody or antigen-binding fragment thereof comprises the VH sequence SEQ ID NO: 197, including one or more post-translational modifications of that sequence. In a particular embodiment, the VH comprises one, two or three CDRs selected from: a. CDR-H1, comprising the amino acid sequence SEQ ID NO: 739, b. CDR-H2, comprising the amino acid sequence SEQ ID NO: 1281, and c. CDR-H3, comprising the amino acid sequence SEQ ID NO: 1823.

[2410] In one aspect, an antibody or antigen-binding fragment thereof is provided, wherein the antibody or antigen-binding fragment thereof comprises a light chain variable domain (VL) having at least 90%, 91%, 92%, 93%, 94%, 95%, 96%, 97%, 98%, 99%, or 100% sequence identity to the amino acid sequence SEQ ID NO: 468. In some embodiments, a VL sequence having at least 90%, 91%, 92%, 93%, 94%, 95%, 96%, 97%, 98%, or 99% identity contains substitutions (e.g., conservative substitutions), insertions, or deletions relative to the reference sequence, but an antibody or antigen-binding fragment thereof comprising that sequence retains the ability to bind to same antigen as the parent (e.g., cancer associated antigen). In some embodiments, a total of 1 to 10 amino acids have been substituted, inserted and/or deleted in the amino acid sequence SEQ ID NO: 468. In some embodiments, the substitutions, insertions, or deletions occur in regions outside the CDRs (e.g., in the FRs). Optionally, the antibody or antigen-binding fragment thereof comprises the VL sequence SEQ ID NO: 468, including one or more post-translational modifications of that sequence. In a particular embodiment, the VL comprises one, two or three CDRs selected from: a. CDR-L1, comprising the amino acid sequence SEQ ID NO: 1010, b. CDR-L2, comprising the amino acid sequence SEQ ID NO: 1552, and c. CDR-L3, comprising the amino acid sequence SEQ ID NO: 2094.

[2411] In one aspect, an antibody or antigen-binding fragment thereof is provided, wherein the antibody or antigen-binding fragment thereof comprises a VH as in any of the embodiments provided above, and a VL as in any of the embodiments provided above. In some embodiments, the antibody or antigen-binding fragment thereof comprises the VH amino acid sequence of SEQ ID NO: 197, and the VL amino acid sequence of SEQ ID NO: 468, optionally including post-translational modifications of those sequences.

### TMES1002

[2412] In one aspect, the present disclosure provides an antibody or antigen-binding fragment thereof comprising at least one or both variable regions selected from: a. VH comprising the amino acid sequence of SEQ ID NO: 198 and b. VL comprising the amino acid sequence of SEQ ID NO: 469.

[2413] In one aspect, the present disclosure provides an antibody or antigen-binding fragment thereof comprising at least one, two, three, four, five, or six CDRs selected from: a. CDR-H1 comprising the amino acid sequence of SEQ ID NO: 740, b. CDR-H2 comprising the amino acid sequence of SEQ ID NO: 1282, c. CDR-H3 comprising the amino acid sequence of SEQ ID NO: 1824, d. CDR-L1 comprising the amino acid sequence of SEQ ID NO: 1011, e. CDR-L2 comprising the amino acid sequence of SEQ ID NO: 1553, and f. CDR-L3 comprising the amino acid sequence of SEQ ID NO: 2095.

[2414] In one aspect, the present disclosure provides an antibody or antigen-binding fragment thereof comprising a CDR-H3 comprising the amino acid sequence of SEQ ID NO: 1824, and a CDR-L3 comprising the amino acid sequence of SEQ ID NO: 2095.

[2415] In one aspect, the present disclosure provides an antibody or antigen-binding fragment thereof comprising at least one, at least two, or all three VH CDR sequences selected from: a. CDR-H1 comprising the amino acid sequence of SEQ ID NO: 740, b. CDR-H2 comprising the amino acid sequence of SEQ ID NO: 1282, c. CDR-H3 comprising the amino acid sequence of SEQ ID NO: 1824, and a VL comprising the amino acid sequence of SEQ ID NO: 469.

[2416] In one aspect, the present disclosure provides an antibody or antigen-binding fragment thereof comprising at least one, at least two, or all three VL CDR sequences selected from: a. CDR-L1 comprising the amino acid sequence of SEQ ID NO: 1011, b. CDR-L2 comprising the amino acid sequence of SEQ ID NO: 1553, c. CDR-L3 comprising the amino acid sequence of SEQ ID NO: 2095, and a VH comprising the amino acid sequence of SEQ ID NO: 198.

[2417] In one aspect, an antibody or antigen-binding fragment thereof is provided, wherein the antibody or antigen-binding fragment thereof comprises a heavy chain variable domain (VH) having at least 90%, 91%, 92%, 93%, 94%, 95%, 96%, 97%, 98%, 99%, or 100% sequence identity to the amino acid sequence SEQ ID NO: 198. In some embodiments, a VH sequence having at least 90%, 91%, 92%, 93%, 94%, 95%, 96%, 97%, 98%, or 99% identity contains substitutions (e.g., conservative substitutions), insertions, or deletions relative to the reference sequence, but an antibody or antigen-binding fragment thereof comprising that sequence retains the ability to bind to same antigen as of the parent (e.g., cancer associated antigen). In some embodiments, a total of 1 to 10 amino acids have been substituted, inserted and/or deleted in the amino acid sequence SEQ ID NO: 198. In some embodiments, substitutions, insertions, or deletions occur in regions outside the CDRs (e.g., in the FRs). Optionally, the antibody or antigen-binding fragment thereof comprises the VH sequence SEQ ID NO: 198, including one or more post-translational modifications of that sequence. In a particular embodiment, the VH comprises one, two or three CDRs selected from: a. CDR-H1, comprising the amino acid sequence SEQ ID NO: 740, b. CDR-H2, comprising the amino acid sequence SEQ ID NO: 1282, and c. CDR-H3, comprising the amino acid sequence SEQ ID NO: 1824.

[2418] In one aspect, an antibody or antigen-binding fragment thereof is provided, wherein the antibody or antigen-binding fragment thereof comprises a light chain variable domain (VL) having at least 90%, 91%, 92%, 93%, 94%, 95%, 96%, 97%, 98%, 99%, or 100% sequence identity to the amino acid sequence SEQ ID NO: 469. In some embodiments, a VL sequence having at least 90%, 91%, 92%, 93%, 94%, 95%, 96%, 97%, 98%, or 99% identity contains substitutions (e.g., conservative substitutions), insertions, or deletions relative to the reference sequence, but an antibody or antigen-binding fragment thereof comprising that sequence retains the ability to bind to same antigen as the parent (e.g., cancer associated antigen). In some embodiments, a total of 1 to 10 amino acids have been substituted, inserted and/or deleted in the amino acid sequence SEQ ID NO: 469. In some embodiments, the substitutions, insertions, or deletions occur in regions outside the CDRs (e.g., in the FRs). Optionally, the antibody or antigen-binding fragment thereof comprises the VL sequence SEQ ID NO: 469, including one or more post-translational modifications of that sequence. In a particular embodiment, the VL comprises one, two or three CDRs selected from: a. CDR-L1, comprising the amino acid sequence SEQ ID NO: 1011, b. CDR-L2, comprising the amino acid sequence SEQ ID NO: 1553, and c. CDR-L3, comprising the amino acid sequence SEQ ID NO: 2095.

[2419] In one aspect, an antibody or antigen-binding fragment thereof is provided, wherein the antibody or antigen-binding fragment thereof comprises a VH as in any of the embodiments provided above, and a VL as in any of the embodiments provided above. In some embodiments, the antibody or antigen-binding fragment thereof comprises the VH amino acid sequence of SEQ ID NO: 198, and the VL amino acid sequence of SEQ ID NO: 469, optionally including post-translational modifications of those sequences.

### TMES1003

[2420] In one aspect, the present disclosure provides an antibody or antigen-binding fragment thereof comprising at least one or both variable regions selected from: a. VH comprising the amino acid sequence of SEQ ID NO: 199 and b. VL comprising the amino acid sequence of SEQ ID NO: 470.

[2421] In one aspect, the present disclosure provides an antibody or antigen-binding fragment thereof comprising at least one, two, three, four, five, or six CDRs selected from: a. CDR-H1 comprising the amino acid sequence of SEQ ID NO: 741, b. CDR-H2 comprising the amino acid sequence of SEQ ID NO: 1283, c. CDR-H3 comprising the amino acid sequence of SEQ ID NO: 1825, d. CDR-L1 comprising the amino acid sequence of SEQ ID NO: 1012, e. CDR-L2 comprising the amino acid sequence of SEQ ID NO: 1554, and f. CDR-L3 comprising the amino acid sequence of SEQ ID NO: 2096.

[2422] In one aspect, the present disclosure provides an antibody or antigen-binding fragment thereof comprising a CDR-H3 comprising the amino acid sequence of SEQ ID NO: 1825, and a CDR-L3 comprising the amino acid sequence of SEQ ID NO: 2096.

[2423] In one aspect, the present disclosure provides an antibody or antigen-binding fragment thereof comprising at least one, at least two, or all three VH CDR sequences selected from: a. CDR-H1 comprising the amino acid sequence of SEQ ID NO: 741, b. CDR-H2 comprising the amino acid sequence of SEQ ID NO: 1283, c. CDR-H3 comprising the amino acid sequence of SEQ ID NO: 1825, and a VL comprising the amino acid sequence of SEQ ID NO: 470.

[2424] In one aspect, the present disclosure provides an antibody or antigen-binding fragment thereof comprising at least one, at least two, or all three VL CDR sequences selected from: a. CDR-L1 comprising the amino acid sequence of SEQ ID NO: 1012, b. CDR-L2 comprising the amino acid sequence of SEQ ID NO: 1554, c. CDR-L3 comprising the amino acid sequence of SEQ ID NO: 2096, and a VH comprising the amino acid sequence of SEQ ID NO: 199.

[2425] In one aspect, an antibody or antigen-binding fragment thereof is provided, wherein the antibody or antigen-binding fragment thereof comprises a heavy chain variable domain (VH) having at least 90%, 91%, 92%, 93%, 94%, 95%, 96%, 97%, 98%, 99%, or 100% sequence identity to the amino acid sequence SEQ ID NO: 199. In some embodiments, a VH sequence having at least 90%, 91%, 92%, 93%, 94%, 95%, 96%, 97%, 98%, or 99% identity contains substitutions (e.g., conservative substitutions), insertions, or deletions relative to the reference sequence, but an antibody or antigen-binding fragment thereof comprising that sequence retains the ability to bind to same antigen as of the parent (e.g., cancer associated antigen). In some embodiments, a total of 1 to 10 amino acids have been substituted, inserted and/or deleted in the amino acid sequence SEQ ID NO: 199. In some embodiments, substitutions, insertions, or deletions occur in regions outside the CDRs (e.g., in the FRs). Optionally, the antibody or antigen-binding fragment thereof comprises the VH sequence SEQ ID NO: 199, including one or more post-translational modifications of that sequence. In a particular embodiment, the VH comprises one, two or three CDRs selected from: a. CDR-H1, comprising the amino acid sequence SEQ ID NO: 741, b. CDR-H2, comprising the amino acid sequence SEQ ID NO: 1283, and c. CDR-H3, comprising the amino acid sequence SEQ ID NO: 1825.

[2426] In one aspect, an antibody or antigen-binding fragment thereof is provided, wherein the antibody or antigen-binding fragment thereof comprises a light chain variable domain (VL) having at least 90%, 91%, 92%, 93%, 94%, 95%, 96%, 97%, 98%, 99%, or 100% sequence identity to the amino acid sequence SEQ ID NO: 470. In some embodiments, a VL sequence having at least 90%, 91%, 92%, 93%, 94%, 95%, 96%, 97%, 98%, or 99% identity contains substitutions (e.g., conservative substitutions), insertions, or deletions relative to the reference sequence, but an antibody or antigen-binding fragment thereof comprising that sequence retains the ability to bind to same antigen as the parent (e.g., cancer associated antigen). In some embodiments, a total of 1 to 10 amino acids have been substituted, inserted and/or deleted in the amino acid sequence SEQ ID NO: 470. In some embodiments, the substitutions, insertions, or deletions occur in regions outside the CDRs (e.g., in the FRs). Optionally, the antibody or antigen-binding fragment thereof comprises the VL sequence SEQ ID NO: 470, including one or more post-translational modifications of that sequence. In a particular embodiment, the VL comprises one, two or three CDRs selected from: a. CDR-L1, comprising the amino acid sequence SEQ ID NO: 1012, b. CDR-L2, comprising the amino acid sequence SEQ ID NO: 1554, and c. CDR-L3, comprising the amino acid sequence SEQ ID NO: 2096.

[2427] In one aspect, an antibody or antigen-binding fragment thereof is provided, wherein the antibody or antigen-binding fragment thereof comprises a VH as in any of the embodiments provided above, and a VL as in any of the embodiments provided above. In some embodiments, the antibody or antigen-binding fragment thereof comprises the VH amino acid sequence of SEQ ID NO: 199, and the VL amino acid sequence of SEQ ID NO: 470, optionally including post-translational modifications of those sequences.

### TMES1004

[2428] In one aspect, the present disclosure provides an antibody or antigen-binding fragment thereof comprising at least one or both variable regions selected from: a. VH comprising the amino acid sequence of SEQ ID NO: 200 and b. VL comprising the amino acid sequence of SEQ ID NO: 471.

[2429] In one aspect, the present disclosure provides an antibody or antigen-binding fragment thereof comprising at least one, two, three, four, five, or six CDRs selected from: a. CDR-H1 comprising the amino acid sequence of SEQ ID NO: 742, b. CDR-H2 comprising the amino acid sequence of SEQ ID NO: 1284, c. CDR-H3 comprising the amino acid sequence of SEQ ID NO: 1826, d. CDR-L1 comprising the amino acid sequence of SEQ ID NO: 1013, e. CDR-L2 comprising the amino acid sequence of SEQ ID NO: 1555, and f. CDR-L3 comprising the amino acid sequence of SEQ ID NO: 2097.

[2430] In one aspect, the present disclosure provides an antibody or antigen-binding fragment thereof comprising a CDR-H3 comprising the amino acid sequence of SEQ ID NO: 1826, and a CDR-L3 comprising the amino acid sequence of SEQ ID NO: 2097.

[2431] In one aspect, the present disclosure provides an antibody or antigen-binding fragment thereof comprising at least one, at least two, or all three VH CDR sequences selected from: a. CDR-H1 comprising the amino acid sequence of SEQ ID NO: 742, b. CDR-H2 comprising the amino acid sequence of SEQ ID NO: 1284, c. CDR-H3 comprising the amino acid sequence of SEQ ID NO: 1826, and a VL comprising the amino acid sequence of SEQ ID NO: 471.

[2432] In one aspect, the present disclosure provides an antibody or antigen-binding fragment thereof comprising at least one, at least two, or all three VL CDR sequences selected from: a. CDR-L1 comprising the amino acid sequence of SEQ ID NO: 1013, b. CDR-L2 comprising the amino acid sequence of SEQ ID NO: 1555, c. CDR-L3 comprising the amino acid sequence of SEQ ID NO: 2097, and a VH comprising the amino acid sequence of SEQ ID NO: 200.

[2433] In one aspect, an antibody or antigen-binding fragment thereof is provided, wherein the antibody or antigen-binding fragment thereof comprises a heavy chain variable domain (VH) having at least 90%, 91%, 92%, 93%, 94%, 95%, 96%, 97%, 98%, 99%, or 100% sequence identity to the amino acid sequence SEQ ID NO: 200. In some embodiments, a VH sequence having at least 90%, 91%, 92%, 93%, 94%, 95%, 96%, 97%, 98%, or 99% identity contains substitutions (e.g., conservative substitutions), insertions, or deletions relative to the reference sequence, but an antibody or antigen-binding fragment thereof comprising that sequence retains the ability to bind to same antigen as of the parent (e.g., cancer associated antigen). In some embodiments, a total of 1 to 10 amino acids have been substituted, inserted and/or deleted in the amino acid sequence SEQ ID NO: 200. In some embodiments, substitutions, insertions, or deletions occur in regions outside the CDRs (e.g., in the FRs). Optionally, the antibody or antigen-binding fragment thereof comprises the VH sequence SEQ ID NO: 200, including one or more post-translational modifications of that sequence. In a particular embodiment, the VH comprises one, two or three CDRs selected from: a. CDR-H1, comprising the amino acid sequence SEQ ID NO: 742, b. CDR-H2, comprising the amino acid sequence SEQ ID NO: 1284, and c. CDR-H3, comprising the amino acid sequence SEQ ID NO: 1826.

[2434] In one aspect, an antibody or antigen-binding fragment thereof is provided, wherein the antibody or antigen-binding fragment thereof comprises a light chain variable domain (VL) having at least 90%, 91%, 92%, 93%, 94%, 95%, 96%, 97%, 98%, 99%, or 100% sequence identity to the amino acid sequence SEQ ID NO: 471. In some embodiments, a VL sequence having at least 90%, 91%, 92%, 93%, 94%, 95%, 96%, 97%, 98%, or 99% identity contains substitutions (e.g., conservative substitutions), insertions, or deletions relative to the reference sequence, but an antibody or antigen-binding fragment thereof comprising that sequence retains the ability to bind to same antigen as the parent (e.g., cancer associated antigen). In some embodiments, a total of 1 to 10 amino acids have been substituted, inserted and/or deleted in the amino acid sequence SEQ ID NO: 471. In some embodiments, the substitutions, insertions, or deletions occur in regions outside the CDRs (e.g., in the FRs). Optionally, the antibody or antigen-binding fragment thereof comprises the VL sequence SEQ ID NO: 471, including one or more post-translational modifications of that sequence. In a particular embodiment, the VL comprises one, two or three CDRs selected from: a. CDR-L1, comprising the amino acid sequence SEQ ID NO: 1013, b. CDR-L2, comprising the amino acid sequence SEQ ID NO: 1555, and c. CDR-L3, comprising the amino acid sequence SEQ ID NO: 2097.

[2435] In one aspect, an antibody or antigen-binding fragment thereof is provided, wherein the antibody or antigen-binding fragment thereof comprises a VH as in any of the embodiments provided above, and a VL as in any of the embodiments provided above. In some embodiments, the antibody or antigen-binding fragment thereof comprises the VH amino acid sequence of SEQ ID NO: 200, and the VL amino acid sequence of SEQ ID NO: 471, optionally including post-translational modifications of those sequences.

### TOVA1001

[2436] In one aspect, the present disclosure provides an antibody or antigen-binding fragment thereof comprising at least one or both variable regions selected from: a. VH comprising the amino acid sequence of SEQ ID NO: 201 and b. VL comprising the amino acid sequence of SEQ ID NO: 472.

[2437] In one aspect, the present disclosure provides an antibody or antigen-binding fragment thereof comprising at least one, two, three, four, five, or six CDRs selected from: a. CDR-H1 comprising the amino acid sequence of SEQ ID NO: 743, b. CDR-H2 comprising the amino acid sequence of SEQ ID NO: 1285, c. CDR-H3 comprising the amino acid sequence of SEQ ID NO: 1827, d. CDR-L1 comprising the amino acid sequence of SEQ ID NO: 1014, e. CDR-L2 comprising the amino acid sequence of SEQ ID NO: 1556, and f. CDR-L3 comprising the amino acid sequence of SEQ ID NO: 2098.

[2438] In one aspect, the present disclosure provides an antibody or antigen-binding fragment thereof comprising a CDR-H3 comprising the amino acid sequence of SEQ ID NO: 1827, and a CDR-L3 comprising the amino acid sequence of SEQ ID NO: 2098.

[2439] In one aspect, the present disclosure provides an antibody or antigen-binding fragment thereof comprising at least one, at least two, or all three VH CDR sequences selected from: a. CDR-H1 comprising the amino acid sequence of SEQ ID NO: 743, b. CDR-H2 comprising the amino acid sequence of SEQ ID NO: 1285, c. CDR-H3 comprising the amino acid sequence of SEQ ID NO: 1827, and a VL comprising the amino acid sequence of SEQ ID NO: 472.

[2440] In one aspect, the present disclosure provides an antibody or antigen-binding fragment thereof comprising at least one, at least two, or all three VL CDR sequences selected from: a. CDR-L1 comprising the amino acid sequence of SEQ ID NO: 1014, b. CDR-L2 comprising the amino acid sequence of SEQ ID NO: 1556, c. CDR-L3 comprising the amino acid sequence of SEQ ID NO: 2098, and a VH comprising the amino acid sequence of SEQ ID NO: 201.

[2441] In one aspect, an antibody or antigen-binding fragment thereof is provided, wherein the antibody or antigen-binding fragment thereof comprises a heavy chain variable domain (VH) having at least 90%, 91%, 92%, 93%, 94%, 95%, 96%, 97%, 98%, 99%, or 100% sequence identity to the amino acid sequence SEQ ID NO: 201. In some embodiments, a VH sequence having at least 90%, 91%, 92%, 93%, 94%, 95%, 96%, 97%, 98%, or 99% identity contains substitutions (e.g., conservative substitutions), insertions, or deletions relative to the reference sequence, but an antibody or antigen-binding fragment thereof comprising that sequence retains the ability to bind to same antigen as of the parent (e.g., cancer associated antigen). In some embodiments, a total of 1 to 10 amino acids have been substituted, inserted and/or deleted in the amino acid sequence SEQ ID NO: 201. In some embodiments, substitutions, insertions, or deletions occur in regions outside the CDRs (e.g., in the FRs). Optionally, the antibody or antigen-binding fragment thereof comprises the VH sequence SEQ ID NO: 201, including one or more post-translational modifications of that sequence. In a particular embodiment, the VH comprises one, two or three CDRs selected from: a. CDR-H1, comprising the amino acid sequence SEQ ID NO: 743, b. CDR-H2, comprising the amino acid sequence SEQ ID NO: 1285, and c. CDR-H3, comprising the amino acid sequence SEQ ID NO: 1827.

[2442] In one aspect, an antibody or antigen-binding fragment thereof is provided, wherein the antibody or antigen-binding fragment thereof comprises a light chain variable domain (VL) having at least 90%, 91%, 92%, 93%, 94%, 95%, 96%, 97%, 98%, 99%, or 100% sequence identity to the amino acid sequence SEQ ID NO: 472. In some embodiments, a VL sequence having at least 90%, 91%, 92%, 93%, 94%, 95%, 96%, 97%, 98%, or 99% identity contains substitutions (e.g., conservative substitutions), insertions, or deletions relative to the reference sequence, but an antibody or antigen-binding fragment thereof comprising that sequence retains the ability to bind to same antigen as the parent (e.g., cancer associated antigen). In some embodiments, a total of 1 to 10 amino acids have been substituted, inserted and/or deleted in the amino acid sequence SEQ ID NO: 472. In some embodiments, the substitutions, insertions, or deletions occur in regions outside the CDRs (e.g., in the FRs). Optionally, the antibody or antigen-binding fragment thereof comprises the VL sequence SEQ ID NO: 472, including one or more post-translational modifications of that sequence. In a particular embodiment, the VL comprises one, two or three CDRs selected from: a. CDR-L1, comprising the amino acid sequence SEQ ID NO: 1014, b. CDR-L2, comprising the amino acid sequence SEQ ID NO: 1556, and c. CDR-L3, comprising the amino acid sequence SEQ ID NO: 2098.

[2443] In one aspect, an antibody or antigen-binding fragment thereof is provided, wherein the antibody or antigen-binding fragment thereof comprises a VH as in any of the embodiments provided above, and a VL as in any of the embodiments provided above. In some embodiments, the antibody or antigen-binding fragment thereof comprises the VH amino acid sequence of SEQ ID NO: 201, and the VL amino acid sequence of SEQ ID NO: 472, optionally including post-translational modifications of those sequences.

### TOVA1002

[2444] In one aspect, the present disclosure provides an antibody or antigen-binding fragment thereof comprising at least one or both variable regions selected from: a. VH comprising the amino acid sequence of SEQ ID NO: 202 and b. VL comprising the amino acid sequence of SEQ ID NO: 473.

[2445] In one aspect, the present disclosure provides an antibody or antigen-binding fragment thereof comprising at least one, two, three, four, five, or six CDRs selected from: a. CDR-H1 comprising the amino acid sequence of SEQ ID NO: 744, b. CDR-H2 comprising the amino acid sequence of SEQ ID NO: 1286, c. CDR-H3 comprising the amino acid sequence of SEQ ID NO: 1828, d. CDR-L1 comprising the amino acid sequence of SEQ ID NO: 1015, e. CDR-L2 comprising the amino acid sequence of SEQ ID NO: 1557, and f. CDR-L3 comprising the amino acid sequence of SEQ ID NO: 2099.

[2446] In one aspect, the present disclosure provides an antibody or antigen-binding fragment thereof comprising a CDR-H3 comprising the amino acid sequence of SEQ ID NO: 1828, and a CDR-L3 comprising the amino acid sequence of SEQ ID NO: 2099.

[2447] In one aspect, the present disclosure provides an antibody or antigen-binding fragment thereof comprising at least one, at least two, or all three VH CDR sequences selected from: a. CDR-H1 comprising the amino acid sequence of SEQ ID NO: 744, b. CDR-H2 comprising the amino acid sequence of SEQ ID NO: 1286, c. CDR-H3 comprising the amino acid sequence of SEQ ID NO: 1828, and a VL comprising the amino acid sequence of SEQ ID NO: 473.

[2448] In one aspect, the present disclosure provides an antibody or antigen-binding fragment thereof comprising at least one, at least two, or all three VL CDR sequences selected from: a. CDR-L1 comprising the amino acid sequence of SEQ ID NO: 1015, b. CDR-L2 comprising the amino acid sequence of SEQ ID NO: 1557, c. CDR-L3 comprising the amino acid sequence of SEQ ID NO: 2099, and a VH comprising the amino acid sequence of SEQ ID NO: 202.

[2449] In one aspect, an antibody or antigen-binding fragment thereof is provided, wherein the antibody or antigen-binding fragment thereof comprises a heavy chain variable domain (VH) having at least 90%, 91%, 92%, 93%, 94%, 95%, 96%, 97%, 98%, 99%, or 100% sequence identity to the amino acid sequence SEQ ID NO: 202. In some embodiments, a VH sequence having at least 90%, 91%, 92%, 93%, 94%, 95%, 96%, 97%, 98%, or 99% identity contains substitutions (e.g., conservative substitutions), insertions, or deletions relative to the reference sequence, but an antibody or antigen-binding fragment thereof comprising that sequence retains the ability to bind to same antigen as of the parent (e.g., cancer associated antigen). In some embodiments, a total of 1 to 10 amino acids have been substituted, inserted and/or deleted in the amino acid sequence SEQ ID NO: 202. In some embodiments, substitutions, insertions, or deletions occur in regions outside the CDRs (e.g., in the FRs). Optionally, the antibody or antigen-binding fragment thereof comprises the VH sequence SEQ ID NO: 202, including one or more post-translational modifications of that sequence. In a particular embodiment, the VH comprises one, two or three CDRs selected from: a. CDR-H1, comprising the amino acid sequence SEQ ID NO: 744, b. CDR-H2, comprising the amino acid sequence SEQ ID NO: 1286, and c. CDR-H3, comprising the amino acid sequence SEQ ID NO: 1828.

[2450] In one aspect, an antibody or antigen-binding fragment thereof is provided, wherein the antibody or antigen-binding fragment thereof comprises a light chain variable domain (VL) having at least 90%, 91%, 92%, 93%, 94%, 95%, 96%, 97%, 98%, 99%, or 100% sequence identity to the amino acid sequence SEQ ID NO: 473. In some embodiments, a VL sequence having at least 90%, 91%, 92%, 93%, 94%, 95%, 96%, 97%, 98%, or 99% identity contains substitutions (e.g., conservative substitutions), insertions, or deletions relative to the reference sequence, but an antibody or antigen-binding fragment thereof comprising that sequence retains the ability to bind to same antigen as the parent (e.g., cancer associated antigen). In some embodiments, a total of 1 to 10 amino acids have been substituted, inserted and/or deleted in the amino acid sequence SEQ ID NO: 473. In some embodiments, the substitutions, insertions, or deletions occur in regions outside the CDRs (e.g., in the FRs). Optionally, the antibody or antigen-binding fragment thereof comprises the VL sequence SEQ ID NO: 473, including one or more post-translational modifications of that sequence. In a particular embodiment, the VL comprises one, two or three CDRs selected from: a. CDR-L1, comprising the amino acid sequence SEQ ID NO: 1015, b. CDR-L2, comprising the amino acid sequence SEQ ID NO: 1557, and c. CDR-L3, comprising the amino acid sequence SEQ ID NO: 2099.

[2451] In one aspect, an antibody or antigen-binding fragment thereof is provided, wherein the antibody or antigen-binding fragment thereof comprises a VH as in any of the embodiments provided above, and a VL as in any of the embodiments provided above. In some embodiments, the antibody or antigen-binding fragment thereof comprises the VH amino acid sequence of SEQ ID NO: 202, and the VL amino acid sequence of SEQ ID NO: 473, optionally including post-translational modifications of those sequences.

### TOVA1003

[2452] In one aspect, the present disclosure provides an antibody or antigen-binding fragment thereof comprising at least one or both variable regions selected from: a. VH comprising the amino acid sequence of SEQ ID NO: 203 and b. VL comprising the amino acid sequence of SEQ ID NO: 474.

[2453] In one aspect, the present disclosure provides an antibody or antigen-binding fragment thereof comprising at least one, two, three, four, five, or six CDRs selected from: a. CDR-H1 comprising the amino acid sequence of SEQ ID NO: 745, b. CDR-H2 comprising the amino acid sequence of SEQ ID NO: 1287, c. CDR-H3 comprising the amino acid sequence of SEQ ID NO: 1829, d. CDR-L1 comprising the amino acid sequence of SEQ ID NO: 1016, e. CDR-L2 comprising the amino acid sequence of SEQ ID NO: 1558, and f. CDR-L3 comprising the amino acid sequence of SEQ ID NO: 2100.

[2454] In one aspect, the present disclosure provides an antibody or antigen-binding fragment thereof comprising a CDR-H3 comprising the amino acid sequence of SEQ ID NO: 1829, and a CDR-L3 comprising the amino acid sequence of SEQ ID NO: 2100.

[2455] In one aspect, the present disclosure provides an antibody or antigen-binding fragment thereof comprising at least one, at least two, or all three VH CDR sequences selected from: a. CDR-H1 comprising the amino acid sequence of SEQ ID NO: 745, b. CDR-H2 comprising the amino acid sequence of SEQ ID NO: 1287, c. CDR-H3 comprising the amino acid sequence of SEQ ID NO: 1829, and a VL comprising the amino acid sequence of SEQ ID NO: 474.

[2456] In one aspect, the present disclosure provides an antibody or antigen-binding fragment thereof comprising at least one, at least two, or all three VL CDR sequences selected from: a. CDR-L1 comprising the amino acid sequence of SEQ ID NO: 1016, b. CDR-L2 comprising the amino acid sequence of SEQ ID NO: 1558, c. CDR-L3 comprising the amino acid sequence of SEQ ID NO: 2100, and a VH comprising the amino acid sequence of SEQ ID NO: 203.

[2457] In one aspect, an antibody or antigen-binding fragment thereof is provided, wherein the antibody or antigen-binding fragment thereof comprises a heavy chain variable domain (VH) having at least 90%, 91%, 92%, 93%, 94%, 95%, 96%, 97%, 98%, 99%, or 100% sequence identity to the amino acid sequence SEQ ID NO: 203. In some embodiments, a VH sequence having at least 90%, 91%, 92%, 93%, 94%, 95%, 96%, 97%, 98%, or 99% identity contains substitutions (e.g., conservative substitutions), insertions, or deletions relative to the reference sequence, but an antibody or antigen-binding fragment thereof comprising that sequence retains the ability to bind to same antigen as of the parent (e.g., cancer associated antigen). In some embodiments, a total of 1 to 10 amino acids have been substituted, inserted and/or deleted in the amino acid sequence SEQ ID NO: 203. In some embodiments, substitutions, insertions, or deletions occur in regions outside the CDRs (e.g., in the FRs). Optionally, the antibody or antigen-binding fragment thereof comprises the VH sequence SEQ ID NO: 203, including one or more post-translational modifications of that sequence. In a particular embodiment, the VH comprises one, two or three CDRs selected from: a. CDR-H1, comprising the amino acid sequence SEQ ID NO: 745, b. CDR-H2, comprising the amino acid sequence SEQ ID NO: 1287, and c. CDR-H3, comprising the amino acid sequence SEQ ID NO: 1829.

[2458] In one aspect, an antibody or antigen-binding fragment thereof is provided, wherein the antibody or antigen-binding fragment thereof comprises a light chain variable domain (VL) having at least 90%, 91%, 92%, 93%, 94%, 95%, 96%, 97%, 98%, 99%, or 100% sequence identity to the amino acid sequence SEQ ID NO: 474. In some embodiments, a VL sequence having at least 90%, 91%, 92%, 93%, 94%, 95%, 96%, 97%, 98%, or 99% identity contains substitutions (e.g., conservative substitutions), insertions, or deletions relative to the reference sequence, but an antibody or antigen-binding fragment thereof comprising that sequence retains the ability to bind to same antigen as the parent (e.g., cancer associated antigen). In some embodiments, a total of 1 to 10 amino acids have been substituted, inserted and/or deleted in the amino acid sequence SEQ ID NO: 474. In some embodiments, the substitutions, insertions, or deletions occur in regions outside the CDRs (e.g., in the FRs). Optionally, the antibody or antigen-binding fragment thereof comprises the VL sequence SEQ ID NO: 474, including one or more post-translational modifications of that sequence. In a particular embodiment, the VL comprises one, two or three CDRs selected from: a. CDR-L1, comprising the amino acid sequence SEQ ID NO: 1016, b. CDR-L2, comprising the amino acid sequence SEQ ID NO: 1558, and c. CDR-L3, comprising the amino acid sequence SEQ ID NO: 2100.

[2459] In one aspect, an antibody or antigen-binding fragment thereof is provided, wherein the antibody or antigen-binding fragment thereof comprises a VH as in any of the embodiments provided above, and a VL as in any of the embodiments provided above. In some embodiments, the antibody or antigen-binding fragment thereof comprises the VH amino acid sequence of SEQ ID NO: 203, and the VL amino acid sequence of SEQ ID NO: 474, optionally including post-translational modifications of those sequences.

### TOVA1004

[2460] In one aspect, the present disclosure provides an antibody or antigen-binding fragment thereof comprising at least one or both variable regions selected from: a. VH comprising the amino acid sequence of SEQ ID NO: 204 and b. VL comprising the amino acid sequence of SEQ ID NO: 475.

[2461] In one aspect, the present disclosure provides an antibody or antigen-binding fragment thereof comprising at least one, two, three, four, five, or six CDRs selected from: a. CDR-H1 comprising the amino acid sequence of SEQ ID NO: 746, b. CDR-H2 comprising the amino acid sequence of SEQ ID NO: 1288, c. CDR-H3 comprising the amino acid sequence of SEQ ID NO: 1830, d. CDR-L1 comprising the amino acid sequence of SEQ ID NO: 1017, e. CDR-L2 comprising the amino acid sequence of SEQ ID NO: 1559, and f. CDR-L3 comprising the amino acid sequence of SEQ ID NO: 2101.

[2462] In one aspect, the present disclosure provides an antibody or antigen-binding fragment thereof comprising a CDR-H3 comprising the amino acid sequence of SEQ ID NO: 1830, and a CDR-L3 comprising the amino acid sequence of SEQ ID NO: 2101.

[2463] In one aspect, the present disclosure provides an antibody or antigen-binding fragment thereof comprising at least one, at least two, or all three VH CDR sequences selected from: a. CDR-H1 comprising the amino acid sequence of SEQ ID NO: 746, b. CDR-H2 comprising the amino acid sequence of SEQ ID NO: 1288, c. CDR-H3 comprising the amino acid sequence of SEQ ID NO: 1830, and a VL comprising the amino acid sequence of SEQ ID NO: 475.

[2464] In one aspect, the present disclosure provides an antibody or antigen-binding fragment thereof comprising at least one, at least two, or all three VL CDR sequences selected from: a. CDR-L1 comprising the amino acid sequence of SEQ ID NO: 1017, b. CDR-L2 comprising the amino acid sequence of SEQ ID NO: 1559, c. CDR-L3 comprising the amino acid sequence of SEQ ID NO: 2101, and a VH comprising the amino acid sequence of SEQ ID NO: 204.

[2465] In one aspect, an antibody or antigen-binding fragment thereof is provided, wherein the antibody or antigen-binding fragment thereof comprises a heavy chain variable domain (VH) having at least 90%, 91%, 92%, 93%, 94%, 95%, 96%, 97%, 98%, 99%, or 100% sequence identity to the amino acid sequence SEQ ID NO: 204. In some embodiments, a VH sequence having at least 90%, 91%, 92%, 93%, 94%, 95%, 96%, 97%, 98%, or 99% identity contains substitutions (e.g., conservative substitutions), insertions, or deletions relative to the reference sequence, but an antibody or antigen-binding fragment thereof comprising that sequence retains the ability to bind to same antigen as of the parent (e.g., cancer associated antigen). In some embodiments, a total of 1 to 10 amino acids have been substituted, inserted and/or deleted in the amino acid sequence SEQ ID NO: 204. In some embodiments, substitutions, insertions, or deletions occur in regions outside the CDRs (e.g., in the FRs). Optionally, the antibody or antigen-binding fragment thereof comprises the VH sequence SEQ ID NO: 204, including one or more post-translational modifications of that sequence. In a particular embodiment, the VH comprises one, two or three CDRs selected from: a. CDR-H1, comprising the amino acid sequence SEQ ID NO: 746, b. CDR-H2, comprising the amino acid sequence SEQ ID NO: 1288, and c. CDR-H3, comprising the amino acid sequence SEQ ID NO: 1830.

[2466] In one aspect, an antibody or antigen-binding fragment thereof is provided, wherein the antibody or antigen-binding fragment thereof comprises a light chain variable domain (VL) having at least 90%, 91%, 92%, 93%, 94%, 95%, 96%, 97%, 98%, 99%, or 100% sequence identity to the amino acid sequence SEQ ID NO: 475. In some embodiments, a VL sequence having at least 90%, 91%, 92%, 93%, 94%, 95%, 96%, 97%, 98%, or 99% identity contains substitutions (e.g., conservative substitutions), insertions, or deletions relative to the reference sequence, but an antibody or antigen-binding fragment thereof comprising that sequence retains the ability to bind to same antigen as the parent (e.g., cancer associated antigen). In some embodiments, a total of 1 to 10 amino acids have been substituted, inserted and/or deleted in the amino acid sequence SEQ ID NO: 475. In some embodiments, the substitutions, insertions, or deletions occur in regions outside the CDRs (e.g., in the FRs). Optionally, the antibody or antigen-binding fragment thereof comprises the VL sequence SEQ ID NO: 475, including one or more post-translational modifications of that sequence. In a particular embodiment, the VL comprises one, two or three CDRs selected from: a. CDR-L1, comprising the amino acid sequence SEQ ID NO: 1017, b. CDR-L2, comprising the amino acid sequence SEQ ID NO: 1559, and c. CDR-L3, comprising the amino acid sequence SEQ ID NO: 2101.

[2467] In one aspect, an antibody or antigen-binding fragment thereof is provided, wherein the antibody or antigen-binding fragment thereof comprises a VH as in any of the embodiments provided above, and a VL as in any of the embodiments provided above. In some embodiments, the antibody or antigen-binding fragment thereof comprises the VH amino acid sequence of SEQ ID NO: 204, and the VL amino acid sequence of SEQ ID NO: 475, optionally including post-translational modifications of those sequences.

### TOVA1005

[2468] In one aspect, the present disclosure provides an antibody or antigen-binding fragment thereof comprising at least one or both variable regions selected from: a. VH comprising the amino acid sequence of SEQ ID NO: 205 and b. VL comprising the amino acid sequence of SEQ ID NO: 476.

[2469] In one aspect, the present disclosure provides an antibody or antigen-binding fragment thereof comprising at least one, two, three, four, five, or six CDRs selected from: a. CDR-H1 comprising the amino acid sequence of SEQ ID NO: 747, b. CDR-H2 comprising the amino acid sequence of SEQ ID NO: 1289, c. CDR-H3 comprising the amino acid sequence of SEQ ID NO: 1831, d. CDR-L1 comprising the amino acid sequence of SEQ ID NO: 1018, e. CDR-L2 comprising the amino acid sequence of SEQ ID NO: 1560, and f. CDR-L3 comprising the amino acid sequence of SEQ ID NO: 2102.

[2470] In one aspect, the present disclosure provides an antibody or antigen-binding fragment thereof comprising a CDR-H3 comprising the amino acid sequence of SEQ ID NO: 1831, and a CDR-L3 comprising the amino acid sequence of SEQ ID NO: 2102.

[2471] In one aspect, the present disclosure provides an antibody or antigen-binding fragment thereof comprising at least one, at least two, or all three VH CDR sequences selected from: a. CDR-H1 comprising the amino acid sequence of SEQ ID NO: 747, b. CDR-H2 comprising the amino acid sequence of SEQ ID NO: 1289, c. CDR-H3 comprising the amino acid sequence of SEQ ID NO: 1831, and a VL comprising the amino acid sequence of SEQ ID NO: 476.

[2472] In one aspect, the present disclosure provides an antibody or antigen-binding fragment thereof comprising at least one, at least two, or all three VL CDR sequences selected from: a. CDR-L1 comprising the amino acid sequence of SEQ ID NO: 1018, b. CDR-L2 comprising the amino acid sequence of SEQ ID NO: 1560, c. CDR-L3 comprising the amino acid sequence of SEQ ID NO: 2102, and d. VH comprising the amino acid sequence of SEQ ID NO: 205.

[2473] In one aspect, an antibody or antigen-binding fragment thereof is provided, wherein the antibody or antigen-binding fragment thereof comprises a heavy chain variable domain (VH) having at least 90%, 91%, 92%, 93%, 94%, 95%, 96%, 97%, 98%, 99%, or 100% sequence identity to the amino acid sequence SEQ ID NO: 205. In some embodiments, a VH sequence having at least 90%, 91%, 92%, 93%, 94%, 95%, 96%, 97%, 98%, or 99% identity contains substitutions (e.g., conservative substitutions), insertions, or deletions relative to the reference sequence, but an antibody or antigen-binding fragment thereof comprising that sequence retains the ability to bind to same antigen as of the parent (e.g., cancer associated antigen). In some embodiments, a total of 1 to 10 amino acids have been substituted, inserted and/or deleted in the amino acid sequence SEQ ID NO: 205. In some embodiments, substitutions, insertions, or deletions occur in regions outside the CDRs (e.g., in the FRs). Optionally, the antibody or antigen-binding fragment thereof comprises the VH sequence SEQ ID NO: 205, including one or more post-translational modifications of that sequence. In a particular embodiment, the VH comprises one, two or three CDRs selected from: a. CDR-H1, comprising the amino acid sequence SEQ ID NO: 747, b. CDR-H2, comprising the amino acid sequence SEQ ID NO: 1289, and c. CDR-H3, comprising the amino acid sequence SEQ ID NO: 1831.

[2474] In one aspect, an antibody or antigen-binding fragment thereof is provided, wherein the antibody or antigen-binding fragment thereof comprises a light chain variable domain (VL) having at least 90%, 91%, 92%, 93%, 94%, 95%, 96%, 97%, 98%, 99%, or 100% sequence identity to the amino acid sequence SEQ ID NO: 476. In some embodiments, a VL sequence having at least 90%, 91%, 92%, 93%, 94%, 95%, 96%, 97%, 98%, or 99% identity contains substitutions (e.g., conservative substitutions), insertions, or deletions relative to the reference sequence, but an antibody or antigen-binding fragment thereof comprising that sequence retains the ability to bind to same antigen as the parent (e.g., cancer associated antigen). In some embodiments, a total of 1 to 10 amino acids have been substituted, inserted and/or deleted in the amino acid sequence SEQ ID NO: 476. In some embodiments, the substitutions, insertions, or deletions occur in regions outside the CDRs (e.g., in the FRs). Optionally, the antibody or antigen-binding fragment thereof comprises the VL sequence SEQ ID NO: 476, including one or more post-translational modifications of that sequence. In a particular embodiment, the VL comprises one, two or three CDRs selected from: a. CDR-L1, comprising the amino acid sequence SEQ ID NO: 1018, b. CDR-L2, comprising the amino acid sequence SEQ ID NO: 1560, and c. CDR-L3, comprising the amino acid sequence SEQ ID NO: 2102.

[2475] In one aspect, an antibody or antigen-binding fragment thereof is provided, wherein the antibody or antigen-binding fragment thereof comprises a VH as in any of the embodiments provided above, and a VL as in any of the embodiments provided above. In some embodiments, the antibody or antigen-binding fragment thereof comprises the VH amino acid sequence of SEQ ID NO: 205, and the VL amino acid sequence of SEQ ID NO: 476, optionally including post-translational modifications of those sequences.

### TOVA1006

[2476] In one aspect, the present disclosure provides an antibody or antigen-binding fragment thereof comprising at least one or both variable regions selected from: a. VH comprising the amino acid sequence of SEQ ID NO: 206 and b. VL comprising the amino acid sequence of SEQ ID NO: 477.

[2477] In one aspect, the present disclosure provides an antibody or antigen-binding fragment thereof comprising at least one, two, three, four, five, or six CDRs selected from: a. CDR-H1 comprising the amino acid sequence of SEQ ID NO: 748, b. CDR-H2 comprising the amino acid sequence of SEQ ID NO: 1290, c. CDR-H3 comprising the amino acid sequence of SEQ ID NO: 1832, d. CDR-L1 comprising the amino acid sequence of SEQ ID NO: 1019, e. CDR-L2 comprising the amino acid sequence of SEQ ID NO: 1561, and f. CDR-L3 comprising the amino acid sequence of SEQ ID NO: 2103.

[2478] In one aspect, the present disclosure provides an antibody or antigen-binding fragment thereof comprising a CDR-H3 comprising the amino acid sequence of SEQ ID NO: 1832, and a CDR-L3 comprising the amino acid sequence of SEQ ID NO: 2103.

[2479] In one aspect, the present disclosure provides an antibody or antigen-binding fragment thereof comprising at least one, at least two, or all three VH CDR sequences selected from: a. CDR-H1 comprising the amino acid sequence of SEQ ID NO: 748, b. CDR-H2 comprising the amino acid sequence of SEQ ID NO: 1290, c. CDR-H3 comprising the amino acid sequence of SEQ ID NO: 1832, and a VL comprising the amino acid sequence of SEQ ID NO: 477.

[2480] In one aspect, the present disclosure provides an antibody or antigen-binding fragment thereof comprising at least one, at least two, or all three VH CDR sequences selected from: a. CDR-H1 comprising the amino acid sequence of SEQ ID NO: 748, b. CDR-H2 comprising the amino acid sequence of SEQ ID NO: 1290, c. CDR-H3 comprising the amino acid sequence of SEQ ID NO: 1832, and a VL comprising the amino acid sequence of SEQ ID NO: 477.

[2481] In one aspect, the present disclosure provides an antibody or antigen-binding fragment thereof comprising at least one, at least two, or all three VL CDR sequences selected from: a. CDR-L1 comprising the amino acid sequence of SEQ ID NO: 1019, b. CDR-L2 comprising the amino acid sequence of SEQ ID NO: 1561, c. CDR-L3 comprising the amino acid sequence of SEQ ID NO: 2103, and a VH comprising the amino acid sequence of SEQ ID NO: 206.

[2482] In one aspect, an antibody or antigen-binding fragment thereof is provided, wherein the antibody or antigen-binding fragment thereof comprises a heavy chain variable domain (VH) having at least 90%, 91%, 92%, 93%, 94%, 95%, 96%, 97%, 98%, 99%, or 100% sequence identity to the amino acid sequence SEQ ID NO: 206. In some embodiments, a VH sequence having at least 90%, 91%, 92%, 93%, 94%, 95%, 96%, 97%, 98%, or 99% identity contains substitutions (e.g., conservative substitutions), insertions, or deletions relative to the reference sequence, but an antibody or antigen-binding fragment thereof comprising that sequence retains the ability to bind to same antigen as of the parent (e.g., cancer associated antigen). In some embodiments, a total of 1 to 10 amino acids have been substituted, inserted and/or deleted in the amino acid sequence SEQ ID NO: 206. In some embodiments, substitutions, insertions, or deletions occur in regions outside the CDRs (e.g., in the FRs). Optionally, the antibody or antigen-binding fragment thereof comprises the VH sequence SEQ ID NO: 206, including one or more post-translational modifications of that sequence. In a particular embodiment, the VH comprises one, two or three CDRs selected from: a. CDR-H1, comprising the amino acid sequence SEQ ID NO: 748, b. CDR-H2, comprising the amino acid sequence SEQ ID NO: 1290, and c. CDR-H3, comprising the amino acid sequence SEQ ID NO: 1832.

[2483] In one aspect, an antibody or antigen-binding fragment thereof is provided, wherein the antibody or antigen-binding fragment thereof comprises a light chain variable domain (VL) having at least 90%, 91%, 92%, 93%, 94%, 95%, 96%, 97%, 98%, 99%, or 100% sequence identity to the amino acid sequence SEQ ID NO: 477. In some embodiments, a VL sequence having at least 90%, 91%, 92%, 93%, 94%, 95%, 96%, 97%, 98%, or 99% identity contains substitutions (e.g., conservative substitutions), insertions, or deletions relative to the reference sequence, but an antibody or antigen-binding fragment thereof comprising that sequence retains the ability to bind to same antigen as the parent (e.g., cancer associated antigen). In some embodiments, a total of 1 to 10 amino acids have been substituted, inserted and/or deleted in the amino acid sequence SEQ ID NO: 477. In some embodiments, the substitutions, insertions, or deletions occur in regions outside the CDRs (e.g., in the FRs). Optionally, the antibody or antigen-binding fragment thereof comprises the VL sequence SEQ ID NO: 477, including one or more post-translational modifications of that sequence. In a particular embodiment, the VL comprises one, two or three CDRs selected from: a. CDR-L1, comprising the amino acid sequence SEQ ID NO: 1019, b. CDR-L2, comprising the amino acid sequence SEQ ID NO: 1561, and c. CDR-L3, comprising the amino acid sequence SEQ ID NO: 2103.

[2484] In one aspect, an antibody or antigen-binding fragment thereof is provided, wherein the antibody or antigen-binding fragment thereof comprises a VH as in any of the embodiments provided above, and a VL as in any of the embodiments provided above. In some embodiments, the antibody or antigen-binding fragment thereof comprises the VH amino acid sequence of SEQ ID NO: 206, and the VL amino acid sequence of SEQ ID NO: 477, optionally including post-translational modifications of those sequences.

### TOVA1007

[2485] In one aspect, the present disclosure provides an antibody or antigen-binding fragment thereof comprising at least one or both variable regions selected from: a. VH comprising the amino acid sequence of SEQ ID NO: 207 and b. VL comprising the amino acid sequence of SEQ ID NO: 478.

[2486] In one aspect, the present disclosure provides an antibody or antigen-binding fragment thereof comprising at least one, two, three, four, five, or six CDRs selected from: a. CDR-H1 comprising the amino acid sequence of SEQ ID NO: 749, b. CDR-H2 comprising the amino acid sequence of SEQ ID NO: 1291, c. CDR-H3 comprising the amino acid sequence of SEQ ID NO: 1833, d. CDR-L1 comprising the amino acid sequence of SEQ ID NO: 1020, e. CDR-L2 comprising the amino acid sequence of SEQ ID NO: 1562, and f. CDR-L3 comprising the amino acid sequence of SEQ ID NO: 2104.

[2487] In one aspect, the present disclosure provides an antibody or antigen-binding fragment thereof comprising a CDR-H3 and a CDR-L3 comprising the amino acid sequence of SEQ ID NO: 2104.

[2488] In one aspect, the present disclosure provides an antibody or antigen-binding fragment thereof comprising at least one, at least two, or all three VH CDR sequences selected from: a. CDR-H1 comprising the amino acid sequence of SEQ ID NO: 749, b. CDR-H2 comprising the amino acid sequence of SEQ ID NO: 1291, c. CDR-H3 comprising the amino acid sequence of SEQ ID NO: 1833, and a VL comprising the amino acid sequence of SEQ ID NO: 478.

[2489] In one aspect, the present disclosure provides an antibody or antigen-binding fragment thereof comprising at least one, at least two, or all three VL CDR sequences selected from: a. CDR-L1 comprising the amino acid sequence of SEQ ID NO: 1020, b. CDR-L2 comprising the amino acid sequence of SEQ ID NO: 1562, c. CDR-L3 comprising the amino acid sequence of SEQ ID NO: 2104, and a VH comprising the amino acid sequence of SEQ ID NO: 207.

[2490] In one aspect, an antibody or antigen-binding fragment thereof is provided, wherein the antibody or antigen-binding fragment thereof comprises a heavy chain variable domain (VH) having at least 90%, 91%, 92%, 93%, 94%, 95%, 96%, 97%, 98%, 99%, or 100% sequence identity to the amino acid sequence SEQ ID NO: 207. In some embodiments, a VH sequence having at least 90%, 91%, 92%, 93%, 94%, 95%, 96%, 97%, 98%, or 99% identity contains substitutions (e.g., conservative substitutions), insertions, or deletions relative to the reference sequence, but an antibody or antigen-binding fragment thereof comprising that sequence retains the ability to bind to same antigen as of the parent (e.g., cancer associated antigen). In some embodiments, a total of 1 to 10 amino acids have been substituted, inserted and/or deleted in the amino acid sequence SEQ ID NO: 207. In some embodiments, substitutions, insertions, or deletions occur in regions outside the CDRs (e.g., in the FRs). Optionally, the antibody or antigen-binding fragment thereof comprises the VH sequence SEQ ID NO: 207, including one or more post-translational modifications of that sequence. In a particular embodiment, the VH comprises one, two or three CDRs selected from: a. CDR-H1, comprising the amino acid sequence SEQ ID NO: 749, b. CDR-H2, comprising the amino acid sequence SEQ ID NO: 1291, and c. CDR-H3, comprising the amino acid sequence SEQ ID NO: 1833.

[2491] In one aspect, an antibody or antigen-binding fragment thereof is provided, wherein the antibody or antigen-binding fragment thereof comprises a light chain variable domain (VL) having at least 90%, 91%, 92%, 93%, 94%, 95%, 96%, 97%, 98%, 99%, or 100% sequence identity to the amino acid sequence SEQ ID NO: 478. In some embodiments, a VL sequence having at least 90%, 91%, 92%, 93%, 94%, 95%, 96%, 97%, 98%, or 99% identity contains substitutions (e.g., conservative substitutions), insertions, or deletions relative to the reference sequence, but an antibody or antigen-binding fragment thereof comprising that sequence retains the ability to bind to same antigen as the parent (e.g., cancer associated antigen). In some embodiments, a total of 1 to 10 amino acids have been substituted, inserted and/or deleted in the amino acid sequence SEQ ID NO: 478. In some embodiments, the substitutions, insertions, or deletions occur in regions outside the CDRs (e.g., in the FRs). Optionally, the antibody or antigen-binding fragment thereof comprises the VL sequence SEQ ID NO: 478, including one or more post-translational modifications of that sequence. In a particular embodiment, the VL comprises one, two or three CDRs selected from: a. CDR-L1, comprising the amino acid sequence SEQ ID NO: 1020, b. CDR-L2, comprising the amino acid sequence SEQ ID NO: 1562, and c. CDR-L3, comprising the amino acid sequence SEQ ID NO: 2104.

[2492] In one aspect, an antibody or antigen-binding fragment thereof is provided, wherein the antibody or antigen-binding fragment thereof comprises a VH as in any of the embodiments provided above, and a VL as in any of the embodiments provided above. In some embodiments, the antibody or antigen-binding fragment thereof comprises the VH amino acid sequence of SEQ ID NO: 207, and the VL amino acid sequence of SEQ ID NO: 478, optionally including post-translational modifications of those sequences.

### TOVA1008

[2493] In one aspect, the present disclosure provides an antibody or antigen-binding fragment thereof comprising at least one or both variable regions selected from: a. VH comprising the amino acid sequence of SEQ ID NO: 208 and b. VL comprising the amino acid sequence of SEQ ID NO: 479.

[2494] In one aspect, the present disclosure provides an antibody or antigen-binding fragment thereof comprising at least one, two, three, four, five, or six CDRs selected from: a. CDR-H1 comprising the amino acid sequence of SEQ ID NO: 750, b. CDR-H2 comprising the amino acid sequence of SEQ ID NO: 1292, c. CDR-H3 comprising the amino acid sequence of SEQ ID NO: 1834, d. CDR-L1 comprising the amino acid sequence of SEQ ID NO: 1021, e. CDR-L2 comprising the amino acid sequence of SEQ ID NO: 1563, and f. CDR-L3 comprising the amino acid sequence of SEQ ID NO: 2105.

[2495] In one aspect, the present disclosure provides an antibody or antigen-binding fragment thereof comprising a CDR-H3 comprising the amino acid sequence of SEQ ID NO: 1834, and a CDR-L3 comprising the amino acid sequence of SEQ ID NO: 2105.

[2496] In one aspect, the present disclosure provides an antibody or antigen-binding fragment thereof comprising at least one, at least two, or all three VH CDR sequences selected from: a. CDR-H1 comprising the amino acid sequence of SEQ ID NO: 750, b. CDR-H2 comprising the amino acid sequence of SEQ ID NO: 1292, c. CDR-H3 comprising the amino acid sequence of SEQ ID NO: 1834, and a VL comprising the amino acid sequence of SEQ ID NO: 479.

[2497] In one aspect, the present disclosure provides an antibody or antigen-binding fragment thereof comprising at least one, at least two, or all three VL CDR sequences selected from: a. CDR-L1 comprising the amino acid sequence of SEQ ID NO: 1021, b. CDR-L2 comprising the amino acid sequence of SEQ ID NO: 1563, c. CDR-L3 comprising the amino acid sequence of SEQ ID NO: 2105, and a VH comprising the amino acid sequence of SEQ ID NO: 208.

[2498] In one aspect, an antibody or antigen-binding fragment thereof is provided, wherein the antibody or antigen-binding fragment thereof comprises a heavy chain variable domain (VH) having at least 90%, 91%, 92%, 93%, 94%, 95%, 96%, 97%, 98%, 99%, or 100% sequence identity to the amino acid sequence SEQ ID NO: 208. In some embodiments, a VH sequence having at least 90%, 91%, 92%, 93%, 94%, 95%, 96%, 97%, 98%, or 99% identity contains substitutions (e.g., conservative substitutions), insertions, or deletions relative to the reference sequence, but an antibody or antigen-binding fragment thereof comprising that sequence retains the ability to bind to same antigen as of the parent (e.g., cancer associated antigen). In some embodiments, a total of 1 to 10 amino acids have been substituted, inserted and/or deleted in the amino acid sequence SEQ ID NO: 208. In some embodiments, substitutions, insertions, or deletions occur in regions outside the CDRs (e.g., in the FRs). Optionally, the antibody or antigen-binding fragment thereof comprises the VH sequence SEQ ID NO: 208, including one or more post-translational modifications of that sequence. In a particular embodiment, the VH comprises one, two or three CDRs selected from: a. CDR-H1, comprising the amino acid sequence SEQ ID NO: 750, b. CDR-H2, comprising the amino acid sequence SEQ ID NO: 1292, and c. CDR-H3, comprising the amino acid sequence SEQ ID NO: 1834.

[2499] In one aspect, an antibody or antigen-binding fragment thereof is provided, wherein the antibody or antigen-binding fragment thereof comprises a light chain variable domain (VL) having at least 90%, 91%, 92%, 93%, 94%, 95%, 96%, 97%, 98%, 99%, or 100% sequence identity to the amino acid sequence SEQ ID NO: 479. In some embodiments, a VL sequence having at least 90%, 91%, 92%, 93%, 94%, 95%, 96%, 97%, 98%, or 99% identity contains substitutions (e.g., conservative substitutions), insertions, or deletions relative to the reference sequence, but an antibody or antigen-binding fragment thereof comprising that sequence retains the ability to bind to same antigen as the parent (e.g., cancer associated antigen). In some embodiments, a total of 1 to 10 amino acids have been substituted, inserted and/or deleted in the amino acid sequence SEQ ID NO: 479. In some embodiments, the substitutions, insertions, or deletions occur in regions outside the CDRs (e.g., in the FRs). Optionally, the antibody or antigen-binding fragment thereof comprises the VL sequence SEQ ID NO: 479, including one or more post-translational modifications of that sequence. In a particular embodiment, the VL comprises one, two or three CDRs selected from: a. CDR-L1, comprising the amino acid sequence SEQ ID NO: 1021, b. CDR-L2, comprising the amino acid sequence SEQ ID NO: 1563, and c. CDR-L3, comprising the amino acid sequence SEQ ID NO: 2105.

[2500] In one aspect, an antibody or antigen-binding fragment thereof is provided, wherein the antibody or antigen-binding fragment thereof comprises a VH as in any of the embodiments provided above, and a VL as in any of the embodiments provided above. In some embodiments, the antibody or antigen-binding fragment thereof comprises the VH amino acid sequence of SEQ ID NO: 208, and the VL amino acid sequence of SEQ ID NO: 479, optionally including post-translational modifications of those sequences.

### TPAN1001

[2501] In one aspect, the present disclosure provides an antibody or antigen-binding fragment thereof comprising at least one or both variable regions selected from: a. VH comprising the amino acid sequence of SEQ ID NO: 209 and b. VL comprising the amino acid sequence of SEQ ID NO: 480.

[2502] In one aspect, the present disclosure provides an antibody or antigen-binding fragment thereof comprising at least one, two, three, four, five, or six CDRs selected from: a. CDR-H1 comprising the amino acid sequence of SEQ ID NO: 751, b. CDR-H2 comprising the amino acid sequence of SEQ ID NO: 1293, c. CDR-H3 comprising the amino acid sequence of SEQ ID NO: 1835, d. CDR-L1 comprising the amino acid sequence of SEQ ID NO: 1022, e. CDR-L2 comprising the amino acid sequence of SEQ ID NO: 1564, and f. CDR-L3 comprising the amino acid sequence of SEQ ID NO: 2106.

[2503] In one aspect, the present disclosure provides an antibody or antigen-binding fragment thereof comprising a CDR-H3 comprising the amino acid sequence of SEQ ID NO: 1835, and a CDR-L3 comprising the amino acid sequence of SEQ ID NO: 2106.

[2504] In one aspect, the present disclosure provides an antibody or antigen-binding fragment thereof comprising at least one, at least two, or all three VH CDR sequences selected from: a. CDR-H1 comprising the amino acid sequence of SEQ ID NO: 751, b. CDR-H2 comprising the amino acid sequence of SEQ ID NO: 1293, c. CDR-H3 comprising the amino acid sequence of SEQ ID NO: 1835, and a VL comprising the amino acid sequence of SEQ ID NO: 480.

[2505] In one aspect, the present disclosure provides an antibody or antigen-binding fragment thereof comprising at least one, at least two, or all three VL CDR sequences selected from: a. CDR-L1 comprising the amino acid sequence of SEQ ID NO: 1022, b. CDR-L2 comprising the amino acid sequence of SEQ ID NO: 1564, c. CDR-L3 comprising the amino acid sequence of SEQ ID NO: 2106, and a VH comprising the amino acid sequence of SEQ ID NO: 209.

[2506] In one aspect, an antibody or antigen-binding fragment thereof is provided, wherein the antibody or antigen-binding fragment thereof comprises a heavy chain variable domain (VH) having at least 90%, 91%, 92%, 93%, 94%, 95%, 96%, 97%, 98%, 99%, or 100% sequence identity to the amino acid sequence SEQ ID NO: 209. In some embodiments, a VH sequence having at least 90%, 91%, 92%, 93%, 94%, 95%, 96%, 97%, 98%, or 99% identity contains substitutions (e.g., conservative substitutions), insertions, or deletions relative to the reference sequence, but an antibody or antigen-binding fragment thereof comprising that sequence retains the ability to bind to same antigen as of the parent (e.g., cancer associated antigen). In some embodiments, a total of 1 to 10 amino acids have been substituted, inserted and/or deleted in the amino acid sequence SEQ ID NO: 209. In some embodiments, substitutions, insertions, or deletions occur in regions outside the CDRs (e.g., in the FRs). Optionally, the antibody or antigen-binding fragment thereof comprises the VH sequence SEQ ID NO: 209, including one or more post-translational modifications of that sequence. In a particular embodiment, the VH comprises one, two or three CDRs selected from: a. CDR-H1, comprising the amino acid sequence SEQ ID NO: 751, b. CDR-H2, comprising the amino acid sequence SEQ ID NO: 1293, and c. CDR-H3, comprising the amino acid sequence SEQ ID NO: 1835.

[2507] In one aspect, an antibody or antigen-binding fragment thereof is provided, wherein the antibody or antigen-binding fragment thereof comprises a light chain variable domain (VL) having at least 90%, 91%, 92%, 93%, 94%, 95%, 96%, 97%, 98%, 99%, or 100% sequence identity to the amino acid sequence SEQ ID NO: 480. In some embodiments, a VL sequence having at least 90%, 91%, 92%, 93%, 94%, 95%, 96%, 97%, 98%, or 99% identity contains substitutions (e.g., conservative substitutions), insertions, or deletions relative to the reference sequence, but an antibody or antigen-binding fragment thereof comprising that sequence retains the ability to bind to same antigen as the parent (e.g., cancer associated antigen). In some embodiments, a total of 1 to 10 amino acids have been substituted, inserted and/or deleted in the amino acid sequence SEQ ID NO: 480. In some embodiments, the substitutions, insertions, or deletions occur in regions outside the CDRs (e.g., in the FRs). Optionally, the antibody or antigen-binding fragment thereof comprises the VL sequence SEQ ID NO: 480, including one or more post-translational modifications of that sequence. In a particular embodiment, the VL comprises one, two or three CDRs selected from: a. CDR-L1, comprising the amino acid sequence SEQ ID NO: 1022, b. CDR-L2, comprising the amino acid sequence SEQ ID NO: 1564, and c. CDR-L3, comprising the amino acid sequence SEQ ID NO: 2106.

[2508] In one aspect, an antibody or antigen-binding fragment thereof is provided, wherein the antibody or antigen-binding fragment thereof comprises a VH as in any of the embodiments provided above, and a VL as in any of the embodiments provided above. In some embodiments, the antibody or antigen-binding fragment thereof comprises the VH amino acid sequence of SEQ ID NO: 209, and the VL amino acid sequence of SEQ ID NO: 480, optionally including post-translational modifications of those sequences.

### TPAN1002

[2509] In one aspect, the present disclosure provides an antibody or antigen-binding fragment thereof comprising at least one or both variable regions selected from: a. VH comprising the amino acid sequence of SEQ ID NO: 210 and b. VL comprising the amino acid sequence of SEQ ID NO: 481.

[2510] In one aspect, the present disclosure provides an antibody or antigen-binding fragment thereof comprising at least one, two, three, four, five, or six CDRs selected from: a. CDR-H1 comprising the amino acid sequence of SEQ ID NO: 752, b. CDR-H2 comprising the amino acid sequence of SEQ ID NO: 1294, c. CDR-H3 comprising the amino acid sequence of SEQ ID NO: 1836, d. CDR-L1 comprising the amino acid sequence of SEQ ID NO: 1023, e. CDR-L2 comprising the amino acid sequence of SEQ ID NO: 1565, and f. CDR-L3 comprising the amino acid sequence of SEQ ID NO: 2107.

[2511] In one aspect, the present disclosure provides an antibody or antigen-binding fragment thereof comprising a CDR-H3 comprising the amino acid sequence of SEQ ID NO: 1836, and a CDR-L3 comprising the amino acid sequence of SEQ ID NO: 2107.

[2512] In one aspect, the present disclosure provides an antibody or antigen-binding fragment thereof comprising at least one, at least two, or all three VH CDR sequences selected from: a. CDR-H1 comprising the amino acid sequence of SEQ ID NO: 752, b. CDR-H2 comprising the amino acid sequence of SEQ ID NO: 1294, c. CDR-H3 comprising the amino acid sequence of SEQ ID NO: 1836, and a VL comprising the amino acid sequence of SEQ ID NO: 481.

[2513] In one aspect, the present disclosure provides an antibody or antigen-binding fragment thereof comprising at least one, at least two, or all three VL CDR sequences selected from: a. CDR-L1 comprising the amino acid sequence of SEQ ID NO: 1023, b. CDR-L2 comprising the amino acid sequence of SEQ ID NO: 1565, c. CDR-L3 comprising the amino acid sequence of SEQ ID NO: 2107, and a VH comprising the amino acid sequence of SEQ ID NO: 210.

[2514] In one aspect, an antibody or antigen-binding fragment thereof is provided, wherein the antibody or antigen-binding fragment thereof comprises a heavy chain variable domain (VH) having at least 90%, 91%, 92%, 93%, 94%, 95%, 96%, 97%, 98%, 99%, or 100% sequence identity to the amino acid sequence SEQ ID NO: 210. In some embodiments, a VH sequence having at least 90%, 91%, 92%, 93%, 94%, 95%, 96%, 97%, 98%, or 99% identity contains substitutions (e.g., conservative substitutions), insertions, or deletions relative to the reference sequence, but an antibody or antigen-binding fragment thereof comprising that sequence retains the ability to bind to same antigen as of the parent (e.g., cancer associated antigen). In some embodiments, a total of 1 to 10 amino acids have been substituted, inserted and/or deleted in the amino acid sequence SEQ ID NO: 210. In some embodiments, substitutions, insertions, or deletions occur in regions outside the CDRs (e.g., in the FRs). Optionally, the antibody or antigen-binding fragment thereof comprises the VH sequence SEQ ID NO: 210, including one or more post-translational modifications of that sequence. In a particular embodiment, the VH comprises one, two or three CDRs selected from: a. CDR-H1, comprising the amino acid sequence SEQ ID NO: 752, b. CDR-H2, comprising the amino acid sequence SEQ ID NO: 1294, and c. CDR-H3, comprising the amino acid sequence SEQ ID NO: 1836.

[2515] In one aspect, an antibody or antigen-binding fragment thereof is provided, wherein the antibody or antigen-binding fragment thereof comprises a light chain variable domain (VL) having at least 90%, 91%, 92%, 93%, 94%, 95%, 96%, 97%, 98%, 99%, or 100% sequence identity to the amino acid sequence SEQ ID NO: 481. In some embodiments, a VL sequence having at least 90%, 91%, 92%, 93%, 94%, 95%, 96%, 97%, 98%, or 99% identity contains substitutions (e.g., conservative substitutions), insertions, or deletions relative to the reference sequence, but an antibody or antigen-binding fragment thereof comprising that sequence retains the ability to bind to same antigen as the parent (e.g., cancer associated antigen). In some embodiments, a total of 1 to 10 amino acids have been substituted, inserted and/or deleted in the amino acid sequence SEQ ID NO: 481. In some embodiments, the substitutions, insertions, or deletions occur in regions outside the CDRs (e.g., in the FRs). Optionally, the antibody or antigen-binding fragment thereof comprises the VL sequence SEQ ID NO: 481, including one or more post-translational modifications of that sequence. In a particular embodiment, the VL comprises one, two or three CDRs selected from: a. CDR-L1, comprising the amino acid sequence SEQ ID NO: 1023, b. CDR-L2, comprising the amino acid sequence SEQ ID NO: 1565, and c. CDR-L3, comprising the amino acid sequence SEQ ID NO: 2107.

[2516] In one aspect, an antibody or antigen-binding fragment thereof is provided, wherein the antibody or antigen-binding fragment thereof comprises a VH as in any of the embodiments provided above, and a VL as in any of the embodiments provided above. In some embodiments, the antibody or antigen-binding fragment thereof comprises the VH amino acid sequence of SEQ ID NO: 210, and the VL amino acid sequence of SEQ ID NO: 481, optionally including post-translational modifications of those sequences. TPAN1003

[2517] In one aspect, the present disclosure provides an antibody or antigen-binding fragment thereof comprising at least one or both variable regions selected from: a. VH comprising the amino acid sequence of SEQ ID NO: 211 and b. VL comprising the amino acid sequence of SEQ ID NO: 482.

[2518] In one aspect, the present disclosure provides an antibody or antigen-binding fragment thereof comprising at least one, two, three, four, five, or six CDRs selected from: a. CDR-H1 comprising the amino acid sequence of SEQ ID NO: 753, b. CDR-H2 comprising the amino acid sequence of SEQ ID NO: 1295, c. CDR-H3 comprising the amino acid sequence of SEQ ID NO: 1837, d. CDR-L1 comprising the amino acid sequence of SEQ ID NO: 1024, e. CDR-L2 comprising the amino acid sequence of SEQ ID NO: 1566, and f. CDR-L3 comprising the amino acid sequence of SEQ ID NO: 2108.

[2519] In one aspect, the present disclosure provides an antibody or antigen-binding fragment thereof comprising a CDR-H3 comprising the amino acid sequence of SEQ ID NO: 1837, and a CDR-L3 comprising the amino acid sequence of SEQ ID NO: 2108.

[2520] In one aspect, the present disclosure provides an antibody or antigen-binding fragment thereof comprising at least one, at least two, or all three VH CDR sequences selected from: a. CDR-H1 comprising the amino acid sequence of SEQ ID NO: 753, b. CDR-H2 comprising the amino acid sequence of SEQ ID NO: 1295, c. CDR-H3 comprising the amino acid sequence of SEQ ID NO: 1837, and a VL comprising the amino acid sequence of SEQ ID NO: 482.

[2521] In one aspect, the present disclosure provides an antibody or antigen-binding fragment thereof comprising at least one, at least two, or all three VL CDR sequences selected from: a. CDR-L1 comprising the amino acid sequence of SEQ ID NO: 1024, b. CDR-L2 comprising the amino acid sequence of SEQ ID NO: 1566, c. CDR-L3 comprising the amino acid sequence of SEQ ID NO: 2108, and a VH comprising the amino acid sequence of SEQ ID NO: 211.

[2522] In one aspect, an antibody or antigen-binding fragment thereof is provided, wherein the antibody or antigen-binding fragment thereof comprises a heavy chain variable domain (VH) having at least 90%, 91%, 92%, 93%, 94%, 95%, 96%, 97%, 98%, 99%, or 100% sequence identity to the amino acid sequence SEQ ID NO: 211. In some embodiments, a VH sequence having at least 90%, 91%, 92%, 93%, 94%, 95%, 96%, 97%, 98%, or 99% identity contains substitutions (e.g., conservative substitutions), insertions, or deletions relative to the reference sequence, but an antibody or antigen-binding fragment thereof comprising that sequence retains the ability to bind to same antigen as of the parent (e.g., cancer associated antigen). In some embodiments, a total of 1 to 10 amino acids have been substituted, inserted and/or deleted in the amino acid sequence SEQ ID NO: 211. In some embodiments, substitutions, insertions, or deletions occur in regions outside the CDRs (e.g., in the FRs). Optionally, the antibody or antigen-binding fragment thereof comprises the VH sequence SEQ ID NO: 211, including one or more post-translational modifications of that sequence. In a particular embodiment, the VH comprises one, two or three CDRs selected from: a. CDR-H1, comprising the amino acid sequence SEQ ID NO: 753, b. CDR-H2, comprising the amino acid sequence SEQ ID NO: 1295, and c. CDR-H3, comprising the amino acid sequence SEQ ID NO: 1837.

[2523] In one aspect, an antibody or antigen-binding fragment thereof is provided, wherein the antibody or antigen-binding fragment thereof comprises a light chain variable domain (VL) having at least 90%, 91%, 92%, 93%, 94%, 95%, 96%, 97%, 98%, 99%, or 100% sequence identity to the amino acid sequence SEQ ID NO: 482. In some embodiments, a VL sequence having at least 90%, 91%, 92%, 93%, 94%, 95%, 96%, 97%, 98%, or 99% identity contains substitutions (e.g., conservative substitutions), insertions, or deletions relative to the reference sequence, but an antibody or antigen-binding fragment thereof comprising that sequence retains the ability to bind to same antigen as the parent (e.g., cancer associated antigen). In some embodiments, a total of 1 to 10 amino acids have been substituted, inserted and/or deleted in the amino acid sequence SEQ ID NO: 482. In some embodiments, the substitutions, insertions, or deletions occur in regions outside the CDRs (e.g., in the FRs). Optionally, the antibody or antigen-binding fragment thereof comprises the VL sequence SEQ ID NO: 482, including one or more post-translational modifications of that sequence. In a particular embodiment, the VL comprises one, two or three CDRs selected from: a. CDR-L1, comprising the amino acid sequence SEQ ID NO: 1024, b. CDR-L2, comprising the amino acid sequence SEQ ID NO: 1566, and c. CDR-L3, comprising the amino acid sequence SEQ ID NO: 2108.

[2524] In one aspect, an antibody or antigen-binding fragment thereof is provided, wherein the antibody or antigen-binding fragment thereof comprises a VH as in any of the embodiments provided above, and a VL as in any of the embodiments provided above. In some embodiments, the antibody or antigen-binding fragment thereof comprises the VH amino acid sequence of SEQ ID NO: 211, and the VL amino acid sequence of SEQ ID NO: 482, optionally including post-translational modifications of those sequences.

### TPAN1004

[2525] In one aspect, the present disclosure provides an antibody or antigen-binding fragment thereof comprising at least one or both variable regions selected from: a. VH comprising the amino acid sequence of SEQ ID NO: 212 and b. VL comprising the amino acid sequence of SEQ ID NO: 483.

[2526] In one aspect, the present disclosure provides an antibody or antigen-binding fragment thereof comprising at least one, two, three, four, five, or six CDRs selected from: a. CDR-H1 comprising the amino acid sequence of SEQ ID NO: 754, b. CDR-H2 comprising the amino acid sequence of SEQ ID NO: 1296, c. CDR-H3 comprising the amino acid sequence of SEQ ID NO: 1838, d. CDR-L1 comprising the amino acid sequence of SEQ ID NO: 1025, e. CDR-L2 comprising the amino acid sequence of SEQ ID NO: 1567, and f. CDR-L3 comprising the amino acid sequence of SEQ ID NO: 2109.

[2527] In one aspect, the present disclosure provides an antibody or antigen-binding fragment thereof comprising a CDR-H3 comprising the amino acid sequence of SEQ ID NO: 1838, and a CDR-L3 comprising the amino acid sequence of SEQ ID NO: 2109.

[2528] In one aspect, the present disclosure provides an antibody or antigen-binding fragment thereof comprising at least one, at least two, or all three VH CDR sequences selected from: a. CDR-H1 comprising the amino acid sequence of SEQ ID NO: 754, b. CDR-H2 comprising the amino acid sequence of SEQ ID NO: 1296, c. CDR-H3 comprising the amino acid sequence of SEQ ID NO: 1838, and a VL comprising the amino acid sequence of SEQ ID NO: 483.

[2529] In one aspect, the present disclosure provides an antibody or antigen-binding fragment thereof comprising at least one, at least two, or all three VL CDR sequences selected from: a. CDR-L1 comprising the amino acid sequence of SEQ ID NO: 1025, b. CDR-L2 comprising the amino acid sequence of SEQ ID NO: 1567, c. CDR-L3 comprising the amino acid sequence of SEQ ID NO: 2109, and a VH comprising the amino acid sequence of SEQ ID NO: 212.

[2530] In one aspect, an antibody or antigen-binding fragment thereof is provided, wherein the antibody or antigen-binding fragment thereof comprises a heavy chain variable domain (VH) having at least 90%, 91%, 92%, 93%, 94%, 95%, 96%, 97%, 98%, 99%, or 100% sequence identity to the amino acid sequence SEQ ID NO: 212. In some embodiments, a VH sequence having at least 90%, 91%, 92%, 93%, 94%, 95%, 96%, 97%, 98%, or 99% identity contains substitutions (e.g., conservative substitutions), insertions, or deletions relative to the reference sequence, but an antibody or antigen-binding fragment thereof comprising that sequence retains the ability to bind to same antigen as of the parent (e.g., cancer associated antigen). In some embodiments, a total of 1 to 10 amino acids have been substituted, inserted and/or deleted in the amino acid sequence SEQ ID NO: 212. In some embodiments, substitutions, insertions, or deletions occur in regions outside the CDRs (e.g., in the FRs). Optionally, the antibody or antigen-binding fragment thereof comprises the VH sequence SEQ ID NO: 212, including one or more post-translational modifications of that sequence. In a particular embodiment, the VH comprises one, two or three CDRs selected from: a. CDR-H1, comprising the amino acid sequence SEQ ID NO: 754, b. CDR-H2, comprising the amino acid sequence SEQ ID NO: 1296, and c. CDR-H3, comprising the amino acid sequence SEQ ID NO: 1838.

[2531] In one aspect, an antibody or antigen-binding fragment thereof is provided, wherein the antibody or antigen-binding fragment thereof comprises a light chain variable domain (VL) having at least 90%, 91%, 92%, 93%, 94%, 95%, 96%, 97%, 98%, 99%, or 100% sequence identity to the amino acid sequence SEQ ID NO: 483. In some embodiments, a VL sequence having at least 90%, 91%, 92%, 93%, 94%, 95%, 96%, 97%, 98%, or 99% identity contains substitutions (e.g., conservative substitutions), insertions, or deletions relative to the reference sequence, but an antibody or antigen-binding fragment thereof comprising that sequence retains the ability to bind to same antigen as the parent (e.g., cancer associated antigen). In some embodiments, a total of 1 to 10 amino acids have been substituted, inserted and/or deleted in the amino acid sequence SEQ ID NO: 483. In some embodiments, the substitutions, insertions, or deletions occur in regions outside the CDRs (e.g., in the FRs). Optionally, the antibody or antigen-binding fragment thereof comprises the VL sequence SEQ ID NO: 483, including one or more post-translational modifications of that sequence. In a particular embodiment, the VL comprises one, two or three CDRs selected from: a. CDR-L1, comprising the amino acid sequence SEQ ID NO: 1025, b. CDR-L2, comprising the amino acid sequence SEQ ID NO: 1567, and c. CDR-L3, comprising the amino acid sequence SEQ ID NO: 2109.

[2532] In one aspect, an antibody or antigen-binding fragment thereof is provided, wherein the antibody or antigen-binding fragment thereof comprises a VH as in any of the embodiments provided above, and a VL as in any of the embodiments provided above. In some embodiments, the antibody or antigen-binding fragment thereof comprises the VH amino acid sequence of SEQ ID NO: 212, and the VL amino acid sequence of SEQ ID NO: 483, optionally including post-translational modifications of those sequences.

### TPAN1005

[2533] In one aspect, the present disclosure provides an antibody or antigen-binding fragment thereof comprising at least one or both variable regions selected from: a. VH comprising the amino acid sequence of SEQ ID NO: 213 and b. VL comprising the amino acid sequence of SEQ ID NO: 484.

[2534] In one aspect, the present disclosure provides an antibody or antigen-binding fragment thereof comprising at least one, two, three, four, five, or six CDRs selected from: a. CDR-H1 comprising the amino acid sequence of SEQ ID NO: 755, b. CDR-H2 comprising the amino acid sequence of SEQ ID NO: 1297, c. CDR-H3 comprising the amino acid sequence of SEQ ID NO: 1839, d. CDR-L1 comprising the amino acid sequence of SEQ ID NO: 1026, e. CDR-L2 comprising the amino acid sequence of SEQ ID NO: 1568, and f. CDR-L3 comprising the amino acid sequence of SEQ ID NO: 2110.

[2535] In one aspect, the present disclosure provides an antibody or antigen-binding fragment thereof comprising a CDR-H3 comprising the amino acid sequence of SEQ ID NO: 1839, and a CDR-L3 comprising the amino acid sequence of SEQ ID NO: 2110.

[2536] In one aspect, the present disclosure provides an antibody or antigen-binding fragment thereof comprising at least one, at least two, or all three VH CDR sequences selected from: a. CDR-H1 comprising the amino acid sequence of SEQ ID NO: 755, b. CDR-H2 comprising the amino acid sequence of SEQ ID NO: 1297, c. CDR-H3 comprising the amino acid sequence of SEQ ID NO: 1839, and a VL comprising the amino acid sequence of SEQ ID NO: 484.

[2537] In one aspect, the present disclosure provides an antibody or antigen-binding fragment thereof comprising at least one, at least two, or all three VL CDR sequences selected from: a. CDR-L1 comprising the amino acid sequence of SEQ ID NO: 1026, b. CDR-L2 comprising the amino acid sequence of SEQ ID NO: 1568, c. CDR-L3 comprising the amino acid sequence of SEQ ID NO: 2110, and a VH comprising the amino acid sequence of SEQ ID NO: 213.

[2538] In one aspect, an antibody or antigen-binding fragment thereof is provided, wherein the antibody or antigen-binding fragment thereof comprises a heavy chain variable domain (VH) having at least 90%, 91%, 92%, 93%, 94%, 95%, 96%, 97%, 98%, 99%, or 100% sequence identity to the amino acid sequence SEQ ID NO: 213. In some embodiments, a VH sequence having at least 90%, 91%, 92%, 93%, 94%, 95%, 96%, 97%, 98%, or 99% identity contains substitutions (e.g., conservative substitutions), insertions, or deletions relative to the reference sequence, but an antibody or antigen-binding fragment thereof comprising that sequence retains the ability to bind to same antigen as of the parent (e.g., cancer associated antigen). In some embodiments, a total of 1 to 10 amino acids have been substituted, inserted and/or deleted in the amino acid sequence SEQ ID NO: 213. In some embodiments, substitutions, insertions, or deletions occur in regions outside the CDRs (e.g., in the FRs). Optionally, the antibody or antigen-binding fragment thereof comprises the VH sequence SEQ ID NO: 213, including one or more post-translational modifications of that sequence. In a particular embodiment, the VH comprises one, two or three CDRs selected from: a. CDR-H1, comprising the amino acid sequence SEQ ID NO: 755, b. CDR-H2, comprising the amino acid sequence SEQ ID NO: 1297, and c. CDR-H3, comprising the amino acid sequence SEQ ID NO: 1839.

[2539] In one aspect, an antibody or antigen-binding fragment thereof is provided, wherein the antibody or antigen-binding fragment thereof comprises a light chain variable domain (VL) having at least 90%, 91%, 92%, 93%, 94%, 95%, 96%, 97%, 98%, 99%, or 100% sequence identity to the amino acid sequence SEQ ID NO: 484. In some embodiments, a VL sequence having at least 90%, 91%, 92%, 93%, 94%, 95%, 96%, 97%, 98%, or 99% identity contains substitutions (e.g., conservative substitutions), insertions, or deletions relative to the reference sequence, but an antibody or antigen-binding fragment thereof comprising that sequence retains the ability to bind to same antigen as the parent (e.g., cancer associated antigen). In some embodiments, a total of 1 to 10 amino acids have been substituted, inserted and/or deleted in the amino acid sequence SEQ ID NO: 484. In some embodiments, the substitutions, insertions, or deletions occur in regions outside the CDRs (e.g., in the FRs). Optionally, the antibody or antigen-binding fragment thereof comprises the VL sequence SEQ ID NO: 484, including one or more post-translational modifications of that sequence. In a particular embodiment, the VL comprises one, two or three CDRs selected from: a. CDR-L1, comprising the amino acid sequence SEQ ID NO: 1026, b. CDR-L2, comprising the amino acid sequence SEQ ID NO: 1568, and c. CDR-L3, comprising the amino acid sequence SEQ ID NO: 2110.

[2540] In one aspect, an antibody or antigen-binding fragment thereof is provided, wherein the antibody or antigen-binding fragment thereof comprises a VH as in any of the embodiments provided above, and a VL as in any of the embodiments provided above. In some embodiments, the antibody or antigen-binding fragment thereof comprises the VH amino acid sequence of SEQ ID NO: 213, and the VL amino acid sequence of SEQ ID NO: 484, optionally including post-translational modifications of those sequences.

### TPAN1006

[2541] In one aspect, the present disclosure provides an antibody or antigen-binding fragment thereof comprising at least one or both variable regions selected from: a. VH comprising the amino acid sequence of SEQ ID NO: 214 and b. VL comprising the amino acid sequence of SEQ ID NO: 485.

[2542] In one aspect, the present disclosure provides an antibody or antigen-binding fragment thereof comprising at least one, two, three, four, five, or six CDRs selected from: a. CDR-H1 comprising the amino acid sequence of SEQ ID NO: 756, b. CDR-H2 comprising the amino acid sequence of SEQ ID NO: 1298, c. CDR-H3 comprising the amino acid sequence of SEQ ID NO: 1840, d. CDR-L1 comprising the amino acid sequence of SEQ ID NO: 1027, e. CDR-L2 comprising the amino acid sequence of SEQ ID NO: 1569, and f. CDR-L3 comprising the amino acid sequence of SEQ ID NO: 2111.

[2543] In one aspect, the present disclosure provides an antibody or antigen-binding fragment thereof comprising a CDR-H3 comprising the amino acid sequence of SEQ ID NO: 1840, and a CDR-L3 comprising the amino acid sequence of SEQ ID NO: 2111.

[2544] In one aspect, the present disclosure provides an antibody or antigen-binding fragment thereof comprising at least one, at least two, or all three VH CDR sequences selected from: a. CDR-H1 comprising the amino acid sequence of SEQ ID NO: 756, b. CDR-H2 comprising the amino acid sequence of SEQ ID NO: 1298, c. CDR-H3 comprising the amino acid sequence of SEQ ID NO: 1840, and a VL comprising the amino acid sequence of SEQ ID NO: 485.

[2545] In one aspect, the present disclosure provides an antibody or antigen-binding fragment thereof comprising at least one, at least two, or all three VL CDR sequences selected from: a. CDR-L1 comprising the amino acid sequence of SEQ ID NO: 1027, b. CDR-L2 comprising the amino acid sequence of SEQ ID NO: 1569, c. CDR-L3 comprising the amino acid sequence of SEQ ID NO: 2111, and a VH comprising the amino acid sequence of SEQ ID NO: 214.

[2546] In one aspect, an antibody or antigen-binding fragment thereof is provided, wherein the antibody or antigen-binding fragment thereof comprises a heavy chain variable domain (VH) having at least 90%, 91%, 92%, 93%, 94%, 95%, 96%, 97%, 98%, 99%, or 100% sequence identity to the amino acid sequence SEQ ID NO: 214. In some embodiments, a VH sequence having at least 90%, 91%, 92%, 93%, 94%, 95%, 96%, 97%, 98%, or 99% identity contains substitutions (e.g., conservative substitutions), insertions, or deletions relative to the reference sequence, but an antibody or antigen-binding fragment thereof comprising that sequence retains the ability to bind to same antigen as of the parent (e.g., cancer associated antigen). In some embodiments, a total of 1 to 10 amino acids have been substituted, inserted and/or deleted in the amino acid sequence SEQ ID NO: 214. In some embodiments, substitutions, insertions, or deletions occur in regions outside the CDRs (e.g., in the FRs). Optionally, the antibody or antigen-binding fragment thereof comprises the VH sequence SEQ ID NO: 214, including one or more post-translational modifications of that sequence. In a particular embodiment, the VH comprises one, two or three CDRs selected from: a. CDR-H1, comprising the amino acid sequence SEQ ID NO: 756, b. CDR-H2, comprising the amino acid sequence SEQ ID NO: 1298, and c. CDR-H3, comprising the amino acid sequence SEQ ID NO: 1840.

[2547] In one aspect, an antibody or antigen-binding fragment thereof is provided, wherein the antibody or antigen-binding fragment thereof comprises a light chain variable domain (VL) having at least 90%, 91%, 92%, 93%, 94%, 95%, 96%, 97%, 98%, 99%, or 100% sequence identity to the amino acid sequence SEQ ID NO: 485. In some embodiments, a VL sequence having at least 90%, 91%, 92%, 93%, 94%, 95%, 96%, 97%, 98%, or 99% identity contains substitutions (e.g., conservative substitutions), insertions, or deletions relative to the reference sequence, but an antibody or antigen-binding fragment thereof comprising that sequence retains the ability to bind to same antigen as the parent (e.g., cancer associated antigen). In some embodiments, a total of 1 to 10 amino acids have been substituted, inserted and/or deleted in the amino acid sequence SEQ ID NO: 485. In some embodiments, the substitutions, insertions, or deletions occur in regions outside the CDRs (e.g., in the FRs). Optionally, the antibody or antigen-binding fragment thereof comprises the VL sequence SEQ ID NO: 485, including one or more post-translational modifications of that sequence. In a particular embodiment, the VL comprises one, two or three CDRs selected from: a. CDR-L1, comprising the amino acid sequence SEQ ID NO: 1027, b. CDR-L2, comprising the amino acid sequence SEQ ID NO: 1569, and c. CDR-L3, comprising the amino acid sequence SEQ ID NO: 2111.

[2548] In one aspect, an antibody or antigen-binding fragment thereof is provided, wherein the antibody or antigen-binding fragment thereof comprises a VH as in any of the embodiments provided above, and a VL as in any of the embodiments provided above. In some embodiments, the antibody or antigen-binding fragment thereof comprises the VH amino acid sequence of SEQ ID NO: 214, and the VL amino acid sequence of SEQ ID NO: 485, optionally including post-translational modifications of those sequences.

### TPAN1007

[2549] In one aspect, the present disclosure provides an antibody or antigen-binding fragment thereof comprising at least one or both variable regions selected from: a. VH comprising the amino acid sequence of SEQ ID NO: 215 and b. VL comprising the amino acid sequence of SEQ ID NO: 486.

[2550] In one aspect, the present disclosure provides an antibody or antigen-binding fragment thereof comprising at least one, two, three, four, five, or six CDRs selected from: a. CDR-H1 comprising the amino acid sequence of SEQ ID NO: 757, b. CDR-H2 comprising the amino acid sequence of SEQ ID NO: 1299, c. CDR-H3 comprising the amino acid sequence of SEQ ID NO: 1841, d. CDR-L1 comprising the amino acid sequence of SEQ ID NO: 1028, e. CDR-L2 comprising the amino acid sequence of SEQ ID NO: 1570, and f. CDR-L3 comprising the amino acid sequence of SEQ ID NO: 2112.

[2551] In one aspect, the present disclosure provides an antibody or antigen-binding fragment thereof comprising a CDR-H3 comprising the amino acid sequence of SEQ ID NO: 1841, and a CDR-L3 comprising the amino acid sequence of SEQ ID NO: 2112.

[2552] In one aspect, the present disclosure provides an antibody or antigen-binding fragment thereof comprising at least one, at least two, or all three VH CDR sequences selected from: a. CDR-H1 comprising the amino acid sequence of SEQ ID NO: 757, b. CDR-H2 comprising the amino acid sequence of SEQ ID NO: 1299, c. CDR-H3 comprising the amino acid sequence of SEQ ID NO: 1841, and a VL comprising the amino acid sequence of SEQ ID NO: 486.

[2553] In one aspect, the present disclosure provides an antibody or antigen-binding fragment thereof comprising at least one, at least two, or all three VL CDR sequences selected from: a. CDR-L1 comprising the amino acid sequence of SEQ ID NO: 1028, b. CDR-L2 comprising the amino acid sequence of SEQ ID NO: 1570, c. CDR-L3 comprising the amino acid sequence of SEQ ID NO: 2112, and a VH comprising the amino acid sequence of SEQ ID NO: 215.

[2554] In one aspect, an antibody or antigen-binding fragment thereof is provided, wherein the antibody or antigen-binding fragment thereof comprises a heavy chain variable domain (VH) having at least 90%, 91%, 92%, 93%, 94%, 95%, 96%, 97%, 98%, 99%, or 100% sequence identity to the amino acid sequence SEQ ID NO: 215. In some embodiments, a VH sequence having at least 90%, 91%, 92%, 93%, 94%, 95%, 96%, 97%, 98%, or 99% identity contains substitutions (e.g., conservative substitutions), insertions, or deletions relative to the reference sequence, but an antibody or antigen-binding fragment thereof comprising that sequence retains the ability to bind to same antigen as of the parent (e.g., cancer associated antigen). In some embodiments, a total of 1 to 10 amino acids have been substituted, inserted and/or deleted in the amino acid sequence SEQ ID NO: 215. In some embodiments, substitutions, insertions, or deletions occur in regions outside the CDRs (e.g., in the FRs). Optionally, the antibody or antigen-binding fragment thereof comprises the VH sequence SEQ ID NO: 215, including one or more post-translational modifications of that sequence. In a particular embodiment, the VH comprises one, two or three CDRs selected from: a. CDR-H1, comprising the amino acid sequence SEQ ID NO: 757, b. CDR-H2, comprising the amino acid sequence SEQ ID NO: 1299, and c. CDR-H3, comprising the amino acid sequence SEQ ID NO: 1841.

[2555] In one aspect, an antibody or antigen-binding fragment thereof is provided, wherein the antibody or antigen-binding fragment thereof comprises a light chain variable domain (VL) having at least 90%, 91%, 92%, 93%, 94%, 95%, 96%, 97%, 98%, 99%, or 100% sequence identity to the amino acid sequence SEQ ID NO: 486. In some embodiments, a VL sequence having at least 90%, 91%, 92%, 93%, 94%, 95%, 96%, 97%, 98%, or 99% identity contains substitutions (e.g., conservative substitutions), insertions, or deletions relative to the reference sequence, but an antibody or antigen-binding fragment thereof comprising that sequence retains the ability to bind to same antigen as the parent (e.g., cancer associated antigen). In some embodiments, a total of 1 to 10 amino acids have been substituted, inserted and/or deleted in the amino acid sequence SEQ ID NO: 486. In some embodiments, the substitutions, insertions, or deletions occur in regions outside the CDRs (e.g., in the FRs). Optionally, the antibody or antigen-binding fragment thereof comprises the VL sequence SEQ ID NO: 486, including one or more post-translational modifications of that sequence. In a particular embodiment, the VL comprises one, two or three CDRs selected from: a. CDR-L1, comprising the amino acid sequence SEQ ID NO: 1028, b. CDR-L2, comprising the amino acid sequence SEQ ID NO: 1570, and c. CDR-L3, comprising the amino acid sequence SEQ ID NO: 2112.

[2556] In one aspect, an antibody or antigen-binding fragment thereof is provided, wherein the antibody or antigen-binding fragment thereof comprises a VH as in any of the embodiments provided above, and a VL as in any of the embodiments provided above. In some embodiments, the antibody or antigen-binding fragment thereof comprises the VH amino acid sequence of SEQ ID NO: 215, and the VL amino acid sequence of SEQ ID NO: 486, optionally including post-translational modifications of those sequences.

### TPHE1001

[2557] In one aspect, the present disclosure provides an antibody or antigen-binding fragment thereof comprising at least one or both variable regions selected from: a. VH comprising the amino acid sequence of SEQ ID NO: 216 and b. VL comprising the amino acid sequence of SEQ ID NO: 487.

[2558] In one aspect, the present disclosure provides an antibody or antigen-binding fragment thereof comprising at least one, two, three, four, five, or six CDRs selected from: a. CDR-H1 comprising the amino acid sequence of SEQ ID NO: 758, b. CDR-H2 comprising the amino acid sequence of SEQ ID NO: 1300, c. CDR-H3 comprising the amino acid sequence of SEQ ID NO: 1842, d. CDR-L1 comprising the amino acid sequence of SEQ ID NO: 1029, e. CDR-L2 comprising the amino acid sequence of SEQ ID NO: 1571, and f. CDR-L3 comprising the amino acid sequence of SEQ ID NO: 2113.

[2559] In one aspect, the present disclosure provides an antibody or antigen-binding fragment thereof comprising a CDR-H3 comprising the amino acid sequence of SEQ ID NO: 1842, and a CDR-L3 comprising the amino acid sequence of SEQ ID NO: 2113.

[2560] In one aspect, the present disclosure provides an antibody or antigen-binding fragment thereof comprising at least one, at least two, or all three VH CDR sequences selected from: a. CDR-H1 comprising the amino acid sequence of SEQ ID NO: 758, b. CDR-H2 comprising the amino acid sequence of SEQ ID NO: 1300, c. CDR-H3 comprising the amino acid sequence of SEQ ID NO: 1842, and a VL comprising the amino acid sequence of SEQ ID NO: 487.

[2561] In one aspect, the present disclosure provides an antibody or antigen-binding fragment thereof comprising at least one, at least two, or all three VL CDR sequences selected from: a. CDR-L1 comprising the amino acid sequence of SEQ ID NO: 1029, b. CDR-L2 comprising the amino acid sequence of SEQ ID NO: 1571, c. CDR-L3 comprising the amino acid sequence of SEQ ID NO: 2113, and a VH comprising the amino acid sequence of SEQ ID NO: 216.

[2562] In one aspect, an antibody or antigen-binding fragment thereof is provided, wherein the antibody or antigen-binding fragment thereof comprises a heavy chain variable domain (VH) having at least 90%, 91%, 92%, 93%, 94%, 95%, 96%, 97%, 98%, 99%, or 100% sequence identity to the amino acid sequence SEQ ID NO: 216. In some embodiments, a VH sequence having at least 90%, 91%, 92%, 93%, 94%, 95%, 96%, 97%, 98%, or 99% identity contains substitutions (e.g., conservative substitutions), insertions, or deletions relative to the reference sequence, but an antibody or antigen-binding fragment thereof comprising that sequence retains the ability to bind to same antigen as of the parent (e.g., cancer associated antigen). In some embodiments, a total of 1 to 10 amino acids have been substituted, inserted and/or deleted in the amino acid sequence SEQ ID NO: 216. In some embodiments, substitutions, insertions, or deletions occur in regions outside the CDRs (e.g., in the FRs). Optionally, the antibody or antigen-binding fragment thereof comprises the VH sequence SEQ ID NO: 216, including one or more post-translational modifications of that sequence. In a particular embodiment, the VH comprises one, two or three CDRs selected from: a. CDR-H1, comprising the amino acid sequence SEQ ID NO: 758, b. CDR-H2, comprising the amino acid sequence SEQ ID NO: 1300, and c. CDR-H3, comprising the amino acid sequence SEQ ID NO: 1842.

[2563] In one aspect, an antibody or antigen-binding fragment thereof is provided, wherein the antibody or antigen-binding fragment thereof comprises a light chain variable domain (VL) having at least 90%, 91%, 92%, 93%, 94%, 95%, 96%, 97%, 98%, 99%, or 100% sequence identity to the amino acid sequence SEQ ID NO: 487. In some embodiments, a VL sequence having at least 90%, 91%, 92%, 93%, 94%, 95%, 96%, 97%, 98%, or 99% identity contains substitutions (e.g., conservative substitutions), insertions, or deletions relative to the reference sequence, but an antibody or antigen-binding fragment thereof comprising that sequence retains the ability to bind to same antigen as the parent (e.g., cancer associated antigen). In some embodiments, a total of 1 to 10 amino acids have been substituted, inserted and/or deleted in the amino acid sequence SEQ ID NO: 487. In some embodiments, the substitutions, antigen-binding fragment thereof comprises the VL sequence SEQ ID NO: 487, including one or more post-translational modifications of that sequence. In a particular embodiment, the VL comprises one, two or three CDRs selected from: a. CDR-L1, comprising the amino acid sequence SEQ ID NO: 1029, b. CDR-L2, comprising the amino acid sequence SEQ ID NO: 1571, and c. CDR-L3, comprising the amino acid sequence SEQ ID NO: 2113.

[2564] In one aspect, an antibody or antigen-binding fragment thereof is provided, wherein the antibody or antigen-binding fragment thereof comprises a VH as in any of the embodiments provided above, and a VL as in any of the embodiments provided above. In some embodiments, the antibody or antigen-binding fragment thereof comprises the VH amino acid sequence of SEQ ID NO: 216, and the VL amino acid sequence of SEQ ID NO: 487, optionally including post-translational modifications of those sequences.

### TPRO1001

[2565] In one aspect, the present disclosure provides an antibody or antigen-binding fragment thereof comprising at least one or both variable regions selected from: a. VH comprising the amino acid sequence of SEQ ID NO: 217 and b. VL comprising the amino acid sequence of SEQ ID NO: 488.

[2566] In one aspect, the present disclosure provides an antibody or antigen-binding fragment thereof comprising at least one, two, three, four, five, or six CDRs selected from: a. CDR-H1 comprising the amino acid sequence of SEQ ID NO: 759, b. CDR-H2 comprising the amino acid sequence of SEQ ID NO: 1301, c. CDR-H3 comprising the amino acid sequence of SEQ ID NO: 1843, d. CDR-L1 comprising the amino acid sequence of SEQ ID NO: 1030, e. CDR-L2 comprising the amino acid sequence of SEQ ID NO: 1572, and f. CDR-L3 comprising the amino acid sequence of SEQ ID NO: 2114.

[2567] In one aspect, the present disclosure provides an antibody or antigen-binding fragment thereof comprising a CDR-H3 comprising the amino acid sequence of SEQ ID NO: 1843, and a CDR-L3 comprising the amino acid sequence of SEQ ID NO: 2114.

[2568] In one aspect, the present disclosure provides an antibody or antigen-binding fragment thereof comprising at least one, at least two, or all three VH CDR sequences selected from: a. CDR-H1 comprising the amino acid sequence of SEQ ID NO: 759, b. CDR-H2 comprising the amino acid sequence of SEQ ID NO: 1301, c. CDR-H3 comprising the amino acid sequence of SEQ ID NO: 1843, and a VL comprising the amino acid sequence of SEQ ID NO: 488.

[2569] In one aspect, the present disclosure provides an antibody or antigen-binding fragment thereof comprising at least one, at least two, or all three VL CDR sequences selected from: a. CDR-L1 comprising the amino acid sequence of SEQ ID NO: 1030, b. CDR-L2 comprising the amino acid sequence of SEQ ID NO: 1572, c. CDR-L3 comprising the amino acid sequence of SEQ ID NO: 2114, and a VH comprising the amino acid sequence of SEQ ID NO: 217.

[2570] In one aspect, an antibody or antigen-binding fragment thereof is provided, wherein the antibody or antigen-binding fragment thereof comprises a heavy chain variable domain (VH) having at least 90%, 91%, 92%, 93%, 94%, 95%, 96%, 97%, 98%, 99%, or 100% sequence identity to the amino acid sequence SEQ ID NO: 217. In some embodiments, a VH sequence having at least 90%, 91%, 92%, 93%, 94%, 95%, 96%, 97%, 98%, or 99% identity contains substitutions (e.g., conservative substitutions), insertions, or deletions relative to the reference sequence, but an antibody or antigen-binding fragment thereof comprising that sequence retains the ability to bind to same antigen as of the parent (e.g., cancer associated antigen). In some embodiments, a total of 1 to 10 amino acids have been substituted, inserted and/or deleted in the amino acid sequence SEQ ID NO: 217. In some embodiments, substitutions, insertions, or deletions occur in regions outside the CDRs (e.g., in the FRs). Optionally, the antibody or antigen-binding fragment thereof comprises the VH sequence SEQ ID NO: 217, including one or more post-translational modifications of that sequence. In a particular embodiment, the VH comprises one, two or three CDRs selected from: a. CDR-H1, comprising the amino acid sequence SEQ ID NO: 759, b. CDR-H2, comprising the amino acid sequence SEQ ID NO: 1301, and c. CDR-H3, comprising the amino acid sequence SEQ ID NO: 1843.

[2571] In one aspect, an antibody or antigen-binding fragment thereof is provided, wherein the antibody or antigen-binding fragment thereof comprises a light chain variable domain (VL) having at least 90%, 91%, 92%, 93%, 94%, 95%, 96%, 97%, 98%, 99%, or 100% sequence identity to the amino acid sequence SEQ ID NO: 488. In some embodiments, a VL sequence having at least 90%, 91%, 92%, 93%, 94%, 95%, 96%, 97%, 98%, or 99% identity contains substitutions (e.g., conservative substitutions), insertions, or deletions relative to the reference sequence, but an antibody or antigen-binding fragment thereof comprising that sequence retains the ability to bind to same antigen as the parent (e.g., cancer associated antigen). In some embodiments, a total of 1 to 10 amino acids have been substituted, inserted and/or deleted in the amino acid sequence SEQ ID NO: 488. In some embodiments, the substitutions, insertions, or deletions occur in regions outside the CDRs (e.g., in the FRs). Optionally, the antibody or antigen-binding fragment thereof comprises the VL sequence SEQ ID NO: 488, including one or more post-translational modifications of that sequence. In a particular embodiment, the VL comprises one, two or three CDRs selected from: a. CDR-L1, comprising the amino acid sequence SEQ ID NO: 1030, b. CDR-L2, comprising the amino acid sequence SEQ ID NO: 1572, and c. CDR-L3, comprising the amino acid sequence SEQ ID NO: 2114.

[2572] In one aspect, an antibody or antigen-binding fragment thereof is provided, wherein the antibody or antigen-binding fragment thereof comprises a VH as in any of the embodiments provided above, and a VL as in any of the embodiments provided above. In some embodiments, the antibody or antigen-binding fragment thereof comprises the VH amino acid sequence of SEQ ID NO: 217, and the VL amino acid sequence of SEQ ID NO: 488, optionally including post-translational modifications of those sequences. TPRO1002

[2573] In one aspect, the present disclosure provides an antibody or antigen-binding fragment thereof comprising at least one or both variable regions selected from: a. VH comprising the amino acid sequence of SEQ ID NO: 218 and b. VL comprising the amino acid sequence of SEQ ID NO: 489.

[2574] In one aspect, the present disclosure provides an antibody or antigen-binding fragment thereof comprising at least one, two, three, four, five, or six CDRs selected from: a. CDR-H1 comprising the amino acid sequence of SEQ ID NO: 760, b. CDR-H2 comprising the amino acid sequence of SEQ ID NO: 1302, c. CDR-H3 comprising the amino acid sequence of SEQ ID NO: 1844, d. CDR-L1 comprising the amino acid sequence of SEQ ID NO: 1031, e. CDR-L2 comprising the amino acid sequence of SEQ ID NO: 1573, f. CDR-L3 comprising the amino acid sequence of SEQ ID NO: 2115.

[2575] In one aspect, the present disclosure provides an antibody or antigen-binding fragment thereof comprising a CDR-H3 comprising the amino acid sequence of SEQ ID NO: 1844, and a CDR-L3 comprising the amino acid sequence of SEQ ID NO: 2115.

[2576] In one aspect, the present disclosure provides an antibody or antigen-binding fragment thereof comprising at least one, at least two, or all three VH CDR sequences selected from: a. CDR-H1 comprising the amino acid sequence of SEQ ID NO: 760, b. CDR-H2 comprising the amino acid sequence of SEQ ID NO: 1302, c. CDR-H3 comprising the amino acid sequence of SEQ ID NO: 1844, and d. VL comprising the amino acid sequence of SEQ ID NO: 489.

[2577] In one aspect, the present disclosure provides an antibody or antigen-binding fragment thereof comprising at least one, at least two, or all three VL CDR sequences selected from: a. CDR-L1 comprising the amino acid sequence of SEQ ID NO: 1031, b. CDR-L2 comprising the amino acid sequence of SEQ ID NO: 1573, c. CDR-L3 comprising the amino acid sequence of SEQ ID NO: 2115, and a VH comprising the amino acid sequence of SEQ ID NO: 218.

[2578] In one aspect, an antibody or antigen-binding fragment thereof is provided, wherein the antibody or antigen-binding fragment thereof comprises a heavy chain variable domain (VH) having at least 90%, 91%, 92%, 93%, 94%, 95%, 96%, 97%, 98%, 99%, or 100% sequence identity to the amino acid sequence SEQ ID NO: 218. In some embodiments, a VH sequence having at least 90%, 91%, 92%, 93%, 94%, 95%, 96%, 97%, 98%, or 99% identity contains substitutions (e.g., conservative substitutions), insertions, or deletions relative to the reference sequence, but an antibody or antigen-binding fragment thereof comprising that sequence retains the ability to bind to same antigen as of the parent (e.g., cancer associated antigen). In some embodiments, a total of 1 to 10 amino acids have been substituted, inserted and/or deleted in the amino acid sequence SEQ ID NO: 218. In some embodiments, substitutions, insertions, or deletions occur in regions outside the CDRs (e.g., in the FRs). Optionally, the antibody or antigen-binding fragment thereof comprises the VH sequence SEQ ID NO: 218, including one or more post-translational modifications of that sequence. In a particular embodiment, the VH comprises one, two or three CDRs selected from: a. CDR-H1, comprising the amino acid sequence SEQ ID NO: 760, b. CDR-H2, comprising the amino acid sequence SEQ ID NO: 1302, and c. CDR-H3, comprising the amino acid sequence SEQ ID NO: 1844.

[2579] In one aspect, an antibody or antigen-binding fragment thereof is provided, wherein the antibody or antigen-binding fragment thereof comprises a light chain variable domain (VL) having at least 90%, 91%, 92%, 93%, 94%, 95%, 96%, 97%, 98%, 99%, or 100% sequence identity to the amino acid sequence SEQ ID NO: 489. In some embodiments, a VL sequence having at least 90%, 91%, 92%, 93%, 94%, 95%, 96%, 97%, 98%, or 99% identity contains substitutions (e.g., conservative substitutions), insertions, or deletions relative to the reference sequence, but an antibody or antigen-binding fragment thereof comprising that sequence retains the ability to bind to same antigen as the parent (e.g., cancer associated antigen). In some embodiments, a total of 1 to 10 amino acids have been substituted, inserted and/or deleted in the amino acid sequence SEQ ID NO: 489. In some embodiments, the substitutions, insertions, or deletions occur in regions outside the CDRs (e.g., in the FRs). Optionally, the antibody or antigen-binding fragment thereof comprises the VL sequence SEQ ID NO: 489, including one or more post-translational modifications of that sequence. In a particular embodiment, the VL comprises one, two or three CDRs selected from: a. CDR-L1, comprising the amino acid sequence SEQ ID NO: 1031, b. CDR-L2, comprising the amino acid sequence SEQ ID NO: 1573, and c. CDR-L3, comprising the amino acid sequence SEQ ID NO: 2115.

[2580] In one aspect, an antibody or antigen-binding fragment thereof is provided, wherein the antibody or antigen-binding fragment thereof comprises a VH as in any of the embodiments provided above, and a VL as in any of the embodiments provided above. In some embodiments, the antibody or antigen-binding fragment thereof comprises the VH amino acid sequence of SEQ ID NO: 218, and the VL amino acid sequence of SEQ ID NO: 489, optionally including post-translational modifications of those sequences.

### TPRO1003

[2581] In one aspect, the present disclosure provides an antibody or antigen-binding fragment thereof comprising at least one or both variable regions selected from: a. VH comprising the amino acid sequence of SEQ ID NO: 219 and b. VL comprising the amino acid sequence of SEQ ID NO: 490.

[2582] In one aspect, the present disclosure provides an antibody or antigen-binding fragment thereof comprising at least one, two, three, four, five, or six CDRs selected from: a. CDR-H1 comprising the amino acid sequence of SEQ ID NO: 761, b. CDR-H2 comprising the amino acid sequence of SEQ ID NO: 1303, c. CDR-H3 comprising the amino acid sequence of SEQ ID NO: 1845, d. CDR-L1 comprising the amino acid sequence of SEQ ID NO: 1032, e. CDR-L2 comprising the amino acid sequence of SEQ ID NO: 1574, and f. CDR-L3 comprising the amino acid sequence of SEQ ID NO: 2116.

[2583] In one aspect, the present disclosure provides an antibody or antigen-binding fragment thereof comprising a CDR-H3 comprising the amino acid sequence of SEQ ID NO: 1845, and a CDR-L3 comprising the amino acid sequence of SEQ ID NO: 2116.

[2584] In one aspect, the present disclosure provides an antibody or antigen-binding fragment thereof comprising at least one, at least two, or all three VH CDR sequences selected from: a. CDR-H1 comprising the amino acid sequence of SEQ ID NO: 761, b. CDR-H2 comprising the amino acid sequence of SEQ ID NO: 1303, c. CDR-H3 comprising the amino acid sequence of SEQ ID NO: 1845, and a VL comprising the amino acid sequence of SEQ ID NO: 490.

[2585] In one aspect, the present disclosure provides an antibody or antigen-binding fragment thereof comprising at least one, at least two, or all three VL CDR sequences selected from: a. CDR-L1 comprising the amino acid sequence of SEQ ID NO: 1032, b. CDR-L2 comprising the amino acid sequence of SEQ ID NO: 1574, c. CDR-L3 comprising the amino acid sequence of SEQ ID NO: 2116, and a VH comprising the amino acid sequence of SEQ ID NO: 219.

[2586] In one aspect, an antibody or antigen-binding fragment thereof is provided, wherein the antibody or antigen-binding fragment thereof comprises a heavy chain variable domain (VH) having at least 90%, 91%, 92%, 93%, 94%, 95%, 96%, 97%, 98%, 99%, or 100% sequence identity to the amino acid sequence SEQ ID NO: 219. In some embodiments, a VH sequence having at least 90%, 91%, 92%, 93%, 94%, 95%, 96%, 97%, 98%, or 99% identity contains substitutions (e.g., conservative substitutions), insertions, or deletions relative to the reference sequence, but an antibody or antigen-binding fragment thereof comprising that sequence retains the ability to bind to same antigen as of the parent (e.g., cancer associated antigen). In some embodiments, a total of 1 to 10 amino acids have been substituted, inserted and/or deleted in the amino acid sequence SEQ ID NO: 219. In some embodiments, substitutions, insertions, or deletions occur in regions outside the CDRs (e.g., in the FRs). Optionally, the antibody or antigen-binding fragment thereof comprises the VH sequence SEQ ID NO: 219, including one or more post-translational modifications of that sequence. In a particular embodiment, the VH comprises one, two or three CDRs selected from: a. CDR-H1, comprising the amino acid sequence SEQ ID NO: 761, b. CDR-H2, comprising the amino acid sequence SEQ ID NO: 1303, and c. CDR-H3, comprising the amino acid sequence SEQ ID NO: 1845.

[2587] In one aspect, an antibody or antigen-binding fragment thereof is provided, wherein the antibody or antigen-binding fragment thereof comprises a light chain variable domain (VL) having at least 90%, 91%, 92%, 93%, 94%, 95%, 96%, 97%, 98%, 99%, or 100% sequence identity to the amino acid sequence SEQ ID NO: 490. In some embodiments, a VL sequence having at least 90%, 91%, 92%, 93%, 94%, 95%, 96%, 97%, 98%, or 99% identity contains substitutions (e.g., conservative substitutions), insertions, or deletions relative to the reference sequence, but an antibody or antigen-binding fragment thereof comprising that sequence retains the ability to bind to same antigen as the parent (e.g., cancer associated antigen). In some embodiments, a total of 1 to 10 amino acids have been substituted, inserted and/or deleted in the amino acid sequence SEQ ID NO: 490. In some embodiments, the substitutions, insertions, or deletions occur in regions outside the CDRs (e.g., in the FRs). Optionally, the antibody or antigen-binding fragment thereof comprises the VL sequence SEQ ID NO: 490, including one or more post-translational modifications of that sequence. In a particular embodiment, the VL comprises one, two or three CDRs selected from: a. CDR-L1, comprising the amino acid sequence SEQ ID NO: 1032, b. CDR-L2, comprising the amino acid sequence SEQ ID NO: 1574, and c. CDR-L3, comprising the amino acid sequence SEQ ID NO: 2116.

[2588] In one aspect, an antibody or antigen-binding fragment thereof is provided, wherein the antibody or antigen-binding fragment thereof comprises a VH as in any of the embodiments provided above, and a VL as in any of the embodiments provided above. In some embodiments, the antibody or antigen-binding fragment thereof comprises the VH amino acid sequence of SEQ ID NO: 219, and the VL amino acid sequence of SEQ ID NO: 490, optionally including post-translational modifications of those sequences. TREC1001

[2589] In one aspect, the present disclosure provides an antibody or antigen-binding fragment thereof comprising at least one or both variable regions selected from: a. VH comprising the amino acid sequence of SEQ ID NO: 220 and b. VL comprising the amino acid sequence of SEQ ID NO: 491.

[2590] In one aspect, the present disclosure provides an antibody or antigen-binding fragment thereof comprising at least one, two, three, four, five, or six CDRs selected from: a. CDR-H1 comprising the amino acid sequence of SEQ ID NO: 762, b. CDR-H2 comprising the amino acid sequence of SEQ ID NO: 1304, c. CDR-H3 comprising the amino acid sequence of SEQ ID NO: 1846, d. CDR-L1 comprising the amino acid sequence of SEQ ID NO: 1033, e. CDR-L2 comprising the amino acid sequence of SEQ ID NO: 1575, and f. CDR-L3 comprising the amino acid sequence of SEQ ID NO: 2117.

[2591] In one aspect, the present disclosure provides an antibody or antigen-binding fragment thereof comprising a CDR-H3 comprising the amino acid sequence of SEQ ID NO: 1846, and a CDR-L3 comprising the amino acid sequence of SEQ ID NO: 2117.

[2592] In one aspect, the present disclosure provides an antibody or antigen-binding fragment thereof comprising at least one, at least two, or all three VH CDR sequences selected from: a. CDR-H1 comprising the amino acid sequence of SEQ ID NO: 762, b. CDR-H2 comprising the amino acid sequence of SEQ ID NO: 1304, c. CDR-H3 comprising the amino acid sequence of SEQ ID NO: 1846, and a VL comprising the amino acid sequence of SEQ ID NO: 491.

[2593] In one aspect, the present disclosure provides an antibody or antigen-binding fragment thereof comprising at least one, at least two, or all three VL CDR sequences selected from: a. CDR-L1 comprising the amino acid sequence of SEQ ID NO: 1033, b. CDR-L2 comprising the amino acid sequence of SEQ ID NO: 1575, c. CDR-L3 comprising the amino acid sequence of SEQ ID NO: 2117, and a VH comprising the amino acid sequence of SEQ ID NO: 220.

[2594] In one aspect, an antibody or antigen-binding fragment thereof is provided, wherein the antibody or antigen-binding fragment thereof comprises a heavy chain variable domain (VH) having at least 90%, 91%, 92%, 93%, 94%, 95%, 96%, 97%, 98%, 99%, or 100% sequence identity to the amino acid sequence SEQ ID NO: 220. In some embodiments, a VH sequence having at least 90%, 91%, 92%, 93%, 94%, 95%, 96%, 97%, 98%, or 99% identity contains substitutions (e.g., conservative substitutions), insertions, or deletions relative to the reference sequence, but an antibody or antigen-binding fragment thereof comprising that sequence retains the ability to bind to same antigen as of the parent (e.g., cancer associated antigen). In some embodiments, a total of 1 to 10 amino acids have been substituted, inserted and/or deleted in the amino acid sequence SEQ ID NO: 220. In some embodiments, substitutions, insertions, or deletions occur in regions outside the CDRs (e.g., in the FRs). Optionally, the antibody or antigen-binding fragment thereof comprises the VH sequence SEQ ID NO: 220, including one or more post-translational modifications of that sequence. In a particular embodiment, the VH comprises one, two or three CDRs selected from: a. CDR-H1, comprising the amino acid sequence SEQ ID NO: 762, b. CDR-H2, comprising the amino acid sequence SEQ ID NO: 1304, and c. CDR-H3, comprising the amino acid sequence SEQ ID NO: 1846.

[2595] In one aspect, an antibody or antigen-binding fragment thereof is provided, wherein the antibody or antigen-binding fragment thereof comprises a light chain variable domain (VL) having at least 90%, 91%, 92%, 93%, 94%, 95%, 96%, 97%, 98%, 99%, or 100% sequence identity to the amino acid sequence SEQ ID NO: 491. In some embodiments, a VL sequence having at least 90%, 91%, 92%, 93%, 94%, 95%, 96%, 97%, 98%, or 99% identity contains substitutions (e.g., conservative substitutions), insertions, or deletions relative to the reference sequence, but an antibody or antigen-binding fragment thereof comprising that sequence retains the ability to bind to same antigen as the parent (e.g., cancer associated antigen). In some embodiments, a total of 1 to 10 amino acids have been substituted, inserted and/or deleted in the amino acid sequence SEQ ID NO: 491. In some embodiments, the substitutions, insertions, or deletions occur in regions outside the CDRs (e.g., in the FRs). Optionally, the antibody or antigen-binding fragment thereof comprises the VL sequence SEQ ID NO: 491, including one or more post-translational modifications of that sequence. In a particular embodiment, the VL comprises one, two or three CDRs selected from: a. CDR-L1, comprising the amino acid sequence SEQ ID NO: 1033, b. CDR-L2, comprising the amino acid sequence SEQ ID NO: 1575, and c. CDR-L3, comprising the amino acid sequence SEQ ID NO: 2117.

[2596] In one aspect, an antibody or antigen-binding fragment thereof is provided, wherein the antibody or antigen-binding fragment thereof comprises a VH as in any of the embodiments provided above, and a VL as in any of the embodiments provided above. In some embodiments, the antibody or antigen-binding fragment thereof comprises the VH amino acid sequence of SEQ ID NO: 220, and the VL amino acid sequence of SEQ ID NO: 491, optionally including post-translational modifications of those sequences.

### TREC1002

[2597] In one aspect, the present disclosure provides an antibody or antigen-binding fragment thereof comprising at least one or both variable regions selected from: a. VH comprising the amino acid sequence of SEQ ID NO: 221 and b. VL comprising the amino acid sequence of SEQ ID NO: 492.

[2598] In one aspect, the present disclosure provides an antibody or antigen-binding fragment thereof comprising at least one, two, three, four, five, or six CDRs selected from: a. CDR-H1 comprising the amino acid sequence of SEQ ID NO: 763, b. CDR-H2 comprising the amino acid sequence of SEQ ID NO: 1305, c. CDR-H3 comprising the amino acid sequence of SEQ ID NO: 1847, d. CDR-L1 comprising the amino acid sequence of SEQ ID NO: 1034, e. CDR-L2 comprising the amino acid sequence of SEQ ID NO: 1576, and f. CDR-L3 comprising the amino acid sequence of SEQ ID NO: 2118.

[2599] In one aspect, the present disclosure provides an antibody or antigen-binding fragment thereof comprising a CDR-H3 comprising the amino acid sequence of SEQ ID NO: 1847, and a CDR-L3 comprising the amino acid sequence of SEQ ID NO: 2118.

[2600] In one aspect, the present disclosure provides an antibody or antigen-binding fragment thereof comprising at least one, at least two, or all three VH CDR sequences selected from: a. CDR-H1 comprising the amino acid sequence of SEQ ID NO: 763, b. CDR-H2 comprising the amino acid sequence of SEQ ID NO: 1305, c. CDR-H3 comprising the amino acid sequence of SEQ ID NO: 1847, and d. VL comprising the amino acid sequence of SEQ ID NO: 492.

[2601] In one aspect, the present disclosure provides an antibody or antigen-binding fragment thereof comprising at least one, at least two, or all three VL CDR sequences selected from: a. CDR-L1 comprising the amino acid sequence of SEQ ID NO: 1034, b. CDR-L2 comprising the amino acid sequence of SEQ ID NO: 1576, c. CDR-L3 comprising the amino acid sequence of SEQ ID NO: 2118, and a VH comprising the amino acid sequence of SEQ ID NO: 221.

[2602] In one aspect, an antibody or antigen-binding fragment thereof is provided, wherein the antibody or antigen-binding fragment thereof comprises a heavy chain variable domain (VH) having at least 90%, 91%, 92%, 93%, 94%, 95%, 96%, 97%, 98%, 99%, or 100% sequence identity to the amino acid sequence SEQ ID NO: 221. In some embodiments, a VH sequence having at least 90%, 91%, 92%, 93%, 94%, 95%, 96%, 97%, 98%, or 99% identity contains substitutions (e.g., conservative substitutions), insertions, or deletions relative to the reference sequence, but an antibody or antigen-binding fragment thereof comprising that sequence retains the ability to bind to same antigen as of the parent (e.g., cancer associated antigen). In some embodiments, a total of 1 to 10 amino acids have been substituted, inserted and/or deleted in the amino acid sequence SEQ ID NO: 221. In some embodiments, substitutions, insertions, or deletions occur in regions outside the CDRs (e.g., in the FRs). Optionally, the antibody or antigen-binding fragment thereof comprises the VH sequence SEQ ID NO: 221, including one or more post-translational modifications of that sequence. In a particular embodiment, the VH comprises one, two or three CDRs selected from: a. CDR-H1, comprising the amino acid sequence SEQ ID NO: 763, b. CDR-H2, comprising the amino acid sequence SEQ ID NO: 1305, and c. CDR-H3, comprising the amino acid sequence SEQ ID NO: 1847.

[2603] In one aspect, an antibody or antigen-binding fragment thereof is provided, wherein the antibody or antigen-binding fragment thereof comprises a light chain variable domain (VL) having at least 90%, 91%, 92%, 93%, 94%, 95%, 96%, 97%, 98%, 99%, or 100% sequence identity to the amino acid sequence SEQ ID NO: 492. In some embodiments, a VL sequence having at least 90%, 91%, 92%, 93%, 94%, 95%, 96%, 97%, 98%, or 99% identity contains substitutions (e.g., conservative substitutions), insertions, or deletions relative to the reference sequence, but an antibody or antigen-binding fragment thereof comprising that sequence retains the ability to bind to same antigen as the parent (e.g., cancer associated antigen). In some embodiments, a total of 1 to 10 amino acids have been substituted, inserted and/or deleted in the amino acid sequence SEQ ID NO: 492. In some embodiments, the substitutions, insertions, or deletions occur in regions outside the CDRs (e.g., in the FRs). Optionally, the antibody or antigen-binding fragment thereof comprises the VL sequence SEQ ID NO: 492, including one or more post-translational modifications of that sequence. In a particular embodiment, the VL comprises one, two or three CDRs selected from: a. CDR-L1, comprising the amino acid sequence SEQ ID NO: 1034, b. CDR-L2, comprising the amino acid sequence SEQ ID NO: 1576, and c. CDR-L3, comprising the amino acid sequence SEQ ID NO: 2118.

[2604] In one aspect, an antibody or antigen-binding fragment thereof is provided, wherein the antibody or antigen-binding fragment thereof comprises a VH as in any of the embodiments provided above, and a VL as in any of the embodiments provided above. In some embodiments, the antibody or antigen-binding fragment thereof comprises the VH amino acid sequence of SEQ ID NO: 221, and the VL amino acid sequence of SEQ ID NO: 492, optionally including post-translational modifications of those sequences.

### TREC1003

[2605] In one aspect, the present disclosure provides an antibody or antigen-binding fragment thereof comprising at least one or both variable regions selected from: a. VH comprising the amino acid sequence of SEQ ID NO: 222 and b. VL comprising the amino acid sequence of SEQ ID NO: 493.

[2606] In one aspect, the present disclosure provides an antibody or antigen-binding fragment thereof comprising at least one, two, three, four, five, or six CDRs selected from: a. CDR-H1 comprising the amino acid sequence of SEQ ID NO: 764, b. CDR-H2 comprising the amino acid sequence of SEQ ID NO: 1306, c. CDR-H3 comprising the amino acid sequence of SEQ ID NO: 1848, d. CDR-L1 comprising the amino acid sequence of SEQ ID NO: 1035, e. CDR-L2 comprising the amino acid sequence of SEQ ID NO: 1577, and f. CDR-L3 comprising the amino acid sequence of SEQ ID NO: 2119.

[2607] In one aspect, the present disclosure provides an antibody or antigen-binding fragment thereof comprising a CDR-H3 comprising the amino acid sequence of SEQ ID NO: 1848, and a CDR-L3 comprising the amino acid sequence of SEQ ID NO: 2119.

[2608] In one aspect, the present disclosure provides an antibody or antigen-binding fragment thereof comprising at least one, at least two, or all three VH CDR sequences selected from: a. CDR-H1 comprising the amino acid sequence of SEQ ID NO: 764, b. CDR-H2 comprising the amino acid sequence of SEQ ID NO: 1306, c. CDR-H3 comprising the amino acid sequence of SEQ ID NO: 1848, and a VL comprising the amino acid sequence of SEQ ID NO: 493.

[2609] In one aspect, the present disclosure provides an antibody or antigen-binding fragment thereof comprising at least one, at least two, or all three VL CDR sequences selected from: a. CDR-L1 comprising the amino acid sequence of SEQ ID NO: 1035, b. CDR-L2 comprising the amino acid sequence of SEQ ID NO: 1577, c. CDR-L3 comprising the amino acid sequence of SEQ ID NO: 2119, and a VH comprising the amino acid sequence of SEQ ID NO: 222.

[2610] In one aspect, an antibody or antigen-binding fragment thereof is provided, wherein the antibody or antigen-binding fragment thereof comprises a heavy chain variable domain (VH) having at least 90%, 91%, 92%, 93%, 94%, 95%, 96%, 97%, 98%, 99%, or 100% sequence identity to the amino acid sequence SEQ ID NO: 222. In some embodiments, a VH sequence having at least 90%, 91%, 92%, 93%, 94%, 95%, 96%, 97%, 98%, or 99% identity contains substitutions (e.g., conservative substitutions), insertions, or deletions relative to the reference sequence, but an antibody or antigen-binding fragment thereof comprising that sequence retains the ability to bind to same antigen as of the parent (e.g., cancer associated antigen). In some embodiments, a total of 1 to 10 amino acids have been substituted, inserted and/or deleted in the amino acid sequence SEQ ID NO: 222. In some embodiments, substitutions, insertions, or deletions occur in regions outside the CDRs (e.g., in the FRs). Optionally, the antibody or antigen-binding fragment thereof comprises the VH sequence SEQ ID NO: 222, including one or more post-translational modifications of that sequence. In a particular embodiment, the VH comprises one, two or three CDRs selected from: a. CDR-H1, comprising the amino acid sequence SEQ ID NO: 764, b. CDR-H2, comprising the amino acid sequence SEQ ID NO: 1306, and c. CDR-H3, comprising the amino acid sequence SEQ ID NO: 1848.

[2611] In one aspect, an antibody or antigen-binding fragment thereof is provided, wherein the antibody or antigen-binding fragment thereof comprises a light chain variable domain (VL) having at least 90%, 91%, 92%, 93%, 94%, 95%, 96%, 97%, 98%, 99%, or 100% sequence identity to the amino acid sequence SEQ ID NO: 493. In some embodiments, a VL sequence having at least 90%, 91%, 92%, 93%, 94%, 95%, 96%, 97%, 98%, or 99% identity contains substitutions (e.g., conservative substitutions), insertions, or deletions relative to the reference sequence, but an antibody or antigen-binding fragment thereof comprising that sequence retains the ability to bind to same antigen as the parent (e.g., cancer associated antigen). In some embodiments, a total of 1 to 10 amino acids have been substituted, inserted and/or deleted in the amino acid sequence SEQ ID NO: 493. In some embodiments, the substitutions, insertions, or deletions occur in regions outside the CDRs (e.g., in the FRs). Optionally, the antibody or antigen-binding fragment thereof comprises the VL sequence SEQ ID NO: 493, including one or more post-translational modifications of that sequence. In a particular embodiment, the VL comprises one, two or three CDRs selected from: a. CDR-L1, comprising the amino acid sequence SEQ ID NO: 1035, b. CDR-L2, comprising the amino acid sequence SEQ ID NO: 1577, and c. CDR-L3, comprising the amino acid sequence SEQ ID NO: 2119.

[2612] In one aspect, an antibody or antigen-binding fragment thereof is provided, wherein the antibody or antigen-binding fragment thereof comprises a VH as in any of the embodiments provided above, and a VL as in any of the embodiments provided above. In some embodiments, the antibody or antigen-binding fragment thereof comprises the VH amino acid sequence of SEQ ID NO: 222, and the VL amino acid sequence of SEQ ID NO: 493, optionally including post-translational modifications of those sequences.

### TSAR1001

[2613] In one aspect, the present disclosure provides an antibody or antigen-binding fragment thereof comprising at least one or both variable regions selected from: a. VH comprising the amino acid sequence of SEQ ID NO: 223 and b. VL comprising the amino acid sequence of SEQ ID NO: 494.

[2614] In one aspect, the present disclosure provides an antibody or antigen-binding fragment thereof comprising at least one, two, three, four, five, or six CDRs selected from: a. CDR-H1 comprising the amino acid sequence of SEQ ID NO: 765, b. CDR-H2 comprising the amino acid sequence of SEQ ID NO: 1307, c. CDR-H3 comprising the amino acid sequence of SEQ ID NO: 1849, d. CDR-L1 comprising the amino acid sequence of SEQ ID NO: 1036, e. CDR-L2 comprising the amino acid sequence of SEQ ID NO: 1578, and f. CDR-L3 comprising the amino acid sequence of SEQ ID NO: 2120.

[2615] In one aspect, the present disclosure provides an antibody or antigen-binding fragment thereof comprising a CDR-H3 comprising the amino acid sequence of SEQ ID NO: 1849, and a CDR-L3 comprising the amino acid sequence of SEQ ID NO: 2120.

[2616] In one aspect, the present disclosure provides an antibody or antigen-binding fragment thereof comprising at least one, at least two, or all three VH CDR sequences selected from: a. CDR-H1 comprising the amino acid sequence of SEQ ID NO: 765, b. CDR-H2 comprising the amino acid sequence of SEQ ID NO: 1307, c. CDR-H3 comprising the amino acid sequence of SEQ ID NO: 1849, and a VL comprising the amino acid sequence of SEQ ID NO: 494.

[2617] In one aspect, the present disclosure provides an antibody or antigen-binding fragment thereof comprising at least one, at least two, or all three VL CDR sequences selected from: a. CDR-L1 comprising the amino acid sequence of SEQ ID NO: 1036, b. CDR-L2 comprising the amino acid sequence of SEQ ID NO: 1578, c. CDR-L3 comprising the amino acid sequence of SEQ ID NO: 2120, and a VH comprising the amino acid sequence of SEQ ID NO: 223.

[2618] In one aspect, an antibody or antigen-binding fragment thereof is provided, wherein the antibody or antigen-binding fragment thereof comprises a heavy chain variable domain (VH) having at least 90%, 91%, 92%, 93%, 94%, 95%, 96%, 97%, 98%, 99%, or 100% sequence identity to the amino acid sequence SEQ ID NO: 223. In some embodiments, a VH sequence having at least 90%, 91%, 92%, 93%, 94%, 95%, 96%, 97%, 98%, or 99% identity contains substitutions (e.g., conservative substitutions), insertions, or deletions relative to the reference sequence, but an antibody or antigen-binding fragment thereof comprising that sequence retains the ability to bind to same antigen as of the parent (e.g., cancer associated antigen). In some embodiments, a total of 1 to 10 amino acids have been substituted, inserted and/or deleted in the amino acid sequence SEQ ID NO: 223. In some embodiments, substitutions, insertions, or deletions occur in regions outside the CDRs (e.g., in the FRs). Optionally, the antibody or antigen-binding fragment thereof comprises the VH sequence SEQ ID NO: 223, including one or more post-translational modifications of that sequence. In a particular embodiment, the VH comprises one, two or three CDRs selected from: a. CDR-H1, comprising the amino acid sequence SEQ ID NO: 765, b. CDR-H2, comprising the amino acid sequence SEQ ID NO: 1307, and c. CDR-H3, comprising the amino acid sequence SEQ ID NO: 1849.

[2619] In one aspect, an antibody or antigen-binding fragment thereof is provided, wherein the antibody or antigen-binding fragment thereof comprises a light chain variable domain (VL) having at least 90%, 91%, 92%, 93%, 94%, 95%, 96%, 97%, 98%, 99%, or 100% sequence identity to the amino acid sequence SEQ ID NO: 494. In some embodiments, a VL sequence having at least 90%, 91%, 92%, 93%, 94%, 95%, 96%, 97%, 98%, or 99% identity contains substitutions (e.g., conservative substitutions), insertions, or deletions relative to the reference sequence, but an antibody or antigen-binding fragment thereof comprising that sequence retains the ability to bind to same antigen as the parent (e.g., cancer associated antigen). In some embodiments, a total of 1 to 10 amino acids have been substituted, inserted and/or deleted in the amino acid sequence SEQ ID NO: 494. In some embodiments, the substitutions, insertions, or deletions occur in regions outside the CDRs (e.g., in the FRs). Optionally, the antibody or antigen-binding fragment thereof comprises the VL sequence SEQ ID NO: 494, including one or more post-translational modifications of that sequence. In a particular embodiment, the VL comprises one, two or three CDRs selected from: a. CDR-L1, comprising the amino acid sequence SEQ ID NO: 1036, b. CDR-L2, comprising the amino acid sequence SEQ ID NO: 1578, and c. CDR-L3, comprising the amino acid sequence SEQ ID NO: 2120.

[2620] In one aspect, an antibody or antigen-binding fragment thereof is provided, wherein the antibody or antigen-binding fragment thereof comprises a VH as in any of the embodiments provided above, and a VL as in any of the embodiments provided above. In some embodiments, the antibody or antigen-binding fragment thereof comprises the VH amino acid sequence of SEQ ID NO: 223, and the VL amino acid sequence of SEQ ID NO: 494, optionally including post-translational modifications of those sequences.

### TSAR1002

[2621] In one aspect, the present disclosure provides an antibody or antigen-binding fragment thereof comprising at least one or both variable regions selected from: a. VH comprising the amino acid sequence of SEQ ID NO: 224 and b. VL comprising the amino acid sequence of SEQ ID NO: 495.

[2622] In one aspect, the present disclosure provides an antibody or antigen-binding fragment thereof comprising at least one, two, three, four, five, or six CDRs selected from: a. CDR-H1 comprising the amino acid sequence of SEQ ID NO: 766, b. CDR-H2 comprising the amino acid sequence of SEQ ID NO: 1308, c. CDR-H3 comprising the amino acid sequence of SEQ ID NO: 1850, d. CDR-L1 comprising the amino acid sequence of SEQ ID NO: 1037, e. CDR-L2 comprising the amino acid sequence of SEQ ID NO: 1579, and f. CDR-L3 comprising the amino acid sequence of SEQ ID NO: 2121.

[2623] In one aspect, the present disclosure provides an antibody or antigen-binding fragment thereof comprising a CDR-H3 comprising the amino acid sequence of SEQ ID NO: 1850, and a CDR-L3 comprising the amino acid sequence of SEQ ID NO: 2121.

[2624] In one aspect, the present disclosure provides an antibody or antigen-binding fragment thereof comprising at least one, at least two, or all three VH CDR sequences selected from: a. CDR-H1 comprising the amino acid sequence of SEQ ID NO: 766, b. CDR-H2 comprising the amino acid sequence of SEQ ID NO: 1308, c. CDR-H3 comprising the amino acid sequence of SEQ ID NO: 1850, and a VL comprising the amino acid sequence of SEQ ID NO: 495.

[2625] In one aspect, the present disclosure provides an antibody or antigen-binding fragment thereof comprising at least one, at least two, or all three VL CDR sequences selected from: a. CDR-L1 comprising the amino acid sequence of SEQ ID NO: 1037, b. CDR-L2 comprising the amino acid sequence of SEQ ID NO: 1579, c. CDR-L3 comprising the amino acid sequence of SEQ ID NO: 2121, and a VH comprising the amino acid sequence of SEQ ID NO: 224.

[2626] In one aspect, an antibody or antigen-binding fragment thereof is provided, wherein the antibody or antigen-binding fragment thereof comprises a heavy chain variable domain (VH) having at least 90%, 91%, 92%, 93%, 94%, 95%, 96%, 97%, 98%, 99%, or 100% sequence identity to the amino acid sequence SEQ ID NO: 224. In some embodiments, a VH sequence having at least 90%, 91%, 92%, 93%, 94%, 95%, 96%, 97%, 98%, or 99% identity contains substitutions (e.g., conservative substitutions), insertions, or deletions relative to the reference sequence, but an antibody or antigen-binding fragment thereof comprising that sequence retains the ability to bind to same antigen as of the parent (e.g., cancer associated antigen). In some embodiments, a total of 1 to 10 amino acids have been substituted, inserted and/or deleted in the amino acid sequence SEQ ID NO: 224. In some embodiments, substitutions, insertions, or deletions occur in regions outside the CDRs (e.g., in the FRs). Optionally, the antibody or antigen-binding fragment thereof comprises the VH sequence SEQ ID NO: 224, including one or more post-translational modifications of that sequence. In a particular embodiment, the VH comprises one, two or three CDRs selected from: a. CDR-H1, comprising the amino acid sequence SEQ ID NO: 766, b. CDR-H2, comprising the amino acid sequence SEQ ID NO: 1308, and c. CDR-H3, comprising the amino acid sequence SEQ ID NO: 1850.

[2627] In one aspect, an antibody or antigen-binding fragment thereof is provided, wherein the antibody or antigen-binding fragment thereof comprises a light chain variable domain (VL) having at least 90%, 91%, 92%, 93%, 94%, 95%, 96%, 97%, 98%, 99%, or 100% sequence identity to the amino acid sequence SEQ ID NO: 495. In some embodiments, a VL sequence having at least 90%, 91%, 92%, 93%, 94%, 95%, 96%, 97%, 98%, or 99% identity contains substitutions (e.g., conservative substitutions), insertions, or deletions relative to the reference sequence, but an antibody or antigen-binding fragment thereof comprising that sequence retains the ability to bind to same antigen as the parent (e.g., cancer associated antigen). In some embodiments, a total of 1 to 10 amino acids have been substituted, inserted and/or deleted in the amino acid sequence SEQ ID NO: 495. In some embodiments, the substitutions, insertions, or deletions occur in regions outside the CDRs (e.g., in the FRs). Optionally, the antibody or antigen-binding fragment thereof comprises the VL sequence SEQ ID NO: 495, including one or more post-translational modifications of that sequence. In a particular embodiment, the VL comprises one, two or three CDRs selected from: a. CDR-L1, comprising the amino acid sequence SEQ ID NO: 1037, b. CDR-L2, comprising the amino acid sequence SEQ ID NO: 1579, and c. CDR-L3, comprising the amino acid sequence SEQ ID NO: 2121.

[2628] In one aspect, an antibody or antigen-binding fragment thereof is provided, wherein the antibody or antigen-binding fragment thereof comprises a VH as in any of the embodiments provided above, and a VL as in any of the embodiments provided above. In some embodiments, the antibody or antigen-binding fragment thereof comprises the VH amino acid sequence of SEQ ID NO: 224, and the VL amino acid sequence of SEQ ID NO: 495, optionally including post-translational modifications of those sequences.

### TSAR1003

[2629] In one aspect, the present disclosure provides an antibody or antigen-binding fragment thereof comprising at least one or both variable regions selected from: a. VH comprising the amino acid sequence of SEQ ID NO: 225 and b. VL comprising the amino acid sequence of SEQ ID NO: 496.

[2630] In one aspect, the present disclosure provides an antibody or antigen-binding fragment thereof comprising at least one, two, three, four, five, or six CDRs selected from: a. CDR-H1 comprising the amino acid sequence of SEQ ID NO: 767, b. CDR-H2 comprising the amino acid sequence of SEQ ID NO: 1309, c. CDR-H3 comprising the amino acid sequence of SEQ ID NO: 1851, d. CDR-L1 comprising the amino acid sequence of SEQ ID NO: 1038, e. CDR-L2 comprising the amino acid sequence of SEQ ID NO: 1580, and f CDR-L3 comprising the amino acid sequence of SEQ ID NO: 2122.

[2631] In one aspect, the present disclosure provides an antibody or antigen-binding fragment thereof comprising a CDR-H3 comprising the amino acid sequence of SEQ ID NO: 1851, and a CDR-L3 comprising the amino acid sequence of SEQ ID NO: 2122.

[2632] In one aspect, the present disclosure provides an antibody or antigen-binding fragment thereof comprising at least one, at least two, or all three VH CDR sequences selected from: a. CDR-H1 comprising the amino acid sequence of SEQ ID NO: 767, b. CDR-H2 comprising the amino acid sequence of SEQ ID NO: 1309, c. CDR-H3 comprising the amino acid sequence of SEQ ID NO: 1851, and a VL comprising the amino acid sequence of SEQ ID NO: 496.

[2633] In one aspect, the present disclosure provides an antibody or antigen-binding fragment thereof comprising at least one, at least two, or all three VL CDR sequences selected from: a. CDR-L1 comprising the amino acid sequence of SEQ ID NO: 1038, b. CDR-L2 comprising the amino acid sequence of SEQ ID NO: 1580, c. CDR-L3 comprising the amino acid sequence of SEQ ID NO: 2122, and a VH comprising the amino acid sequence of SEQ ID NO: 225.

[2634] In one aspect, an antibody or antigen-binding fragment thereof is provided, wherein the antibody or antigen-binding fragment thereof comprises a heavy chain variable domain (VH) having at least 90%, 91%, 92%, 93%, 94%, 95%, 96%, 97%, 98%, 99%, or 100% sequence identity to the amino acid sequence SEQ ID NO: 225. In some embodiments, a VH sequence having at least 90%, 91%, 92%, 93%, 94%, 95%, 96%, 97%, 98%, or 99% identity contains substitutions (e.g., conservative substitutions), insertions, or deletions relative to the reference sequence, but an antibody or antigen-binding fragment thereof comprising that sequence retains the ability to bind to same antigen as of the parent (e.g., cancer associated antigen). In some embodiments, a total of 1 to 10 amino acids have been substituted, inserted and/or deleted in the amino acid sequence SEQ ID NO: 225. In some embodiments, substitutions, insertions, or deletions occur in regions outside the CDRs (e.g., in the FRs). Optionally, the antibody or antigen-binding fragment thereof comprises the VH sequence SEQ ID NO: 225, including one or more post-translational modifications of that sequence. In a particular embodiment, the VH comprises one, two or three CDRs selected from: a. CDR-H1, comprising the amino acid sequence SEQ ID NO: 767, b. CDR-H2, comprising the amino acid sequence SEQ ID NO: 1309, and c. CDR-H3, comprising the amino acid sequence SEQ ID NO: 1851.

[2635] In one aspect, an antibody or antigen-binding fragment thereof is provided, wherein the antibody or antigen-binding fragment thereof comprises a light chain variable domain (VL) having at least 90%, 91%, 92%, 93%, 94%, 95%, 96%, 97%, 98%, 99%, or 100% sequence identity to the amino acid sequence SEQ ID NO: 496. In some embodiments, a VL sequence having at least 90%, 91%, 92%, 93%, 94%, 95%, 96%, 97%, 98%, or 99% identity contains substitutions (e.g., conservative substitutions), insertions, or deletions relative to the reference sequence, but an antibody or antigen-binding fragment thereof comprising that sequence retains the ability to bind to same antigen as the parent (e.g., cancer associated antigen). In some embodiments, a total of 1 to 10 amino acids have been substituted, inserted and/or deleted in the amino acid sequence SEQ ID NO: 496. In some embodiments, the substitutions, insertions, or deletions occur in regions outside the CDRs (e.g., in the FRs). Optionally, the antibody or antigen-binding fragment thereof comprises the VL sequence SEQ ID NO: 496, including one or more post-translational modifications of that sequence. In a particular embodiment, the VL comprises one, two or three CDRs selected from: a. CDR-L1, comprising the amino acid sequence SEQ ID NO: 1038, b. CDR-L2, comprising the amino acid sequence SEQ ID NO: 1580, and c. CDR-L3, comprising the amino acid sequence SEQ ID NO: 2122.

[2636] In one aspect, an antibody or antigen-binding fragment thereof is provided, wherein the antibody or antigen-binding fragment thereof comprises a VH as in any of the embodiments provided above, and a VL as in any of the embodiments provided above. In some embodiments, the antibody or antigen-binding fragment thereof comprises the VH amino acid sequence of SEQ ID NO: 225, and the VL amino acid sequence of SEQ ID NO: 496, optionally including post-translational modifications of those sequences.

### TSAR1004

[2637] In one aspect, the present disclosure provides an antibody or antigen-binding fragment thereof comprising at least one or both variable regions selected from: a. VH comprising the amino acid sequence of SEQ ID NO: 226 and b. VL comprising the amino acid sequence of SEQ ID NO: 497.

[2638] In one aspect, the present disclosure provides an antibody or antigen-binding fragment thereof comprising at least one, two, three, four, five, or six CDRs selected from: a. CDR-H1 comprising the amino acid sequence of SEQ ID NO: 768, b. CDR-H2 comprising the amino acid sequence of SEQ ID NO: 1310, c. CDR-H3 comprising the amino acid sequence of SEQ ID NO: 1852, d. CDR-L1 comprising the amino acid sequence of SEQ ID NO: 1039, e. CDR-L2 comprising the amino acid sequence of SEQ ID NO: 1581, and f. CDR-L3 comprising the amino acid sequence of SEQ ID NO: 2123.

[2639] In one aspect, the present disclosure provides an antibody or antigen-binding fragment thereof comprising a CDR-H3 comprising the amino acid sequence of SEQ ID NO: 1852, and a CDR-L3 comprising the amino acid sequence of SEQ ID NO: 2123.

[2640] In one aspect, the present disclosure provides an antibody or antigen-binding fragment thereof comprising at least one, at least two, or all three VH CDR sequences selected from: a. CDR-H1 comprising the amino acid sequence of SEQ ID NO: 768, b. CDR-H2 comprising the amino acid sequence of SEQ ID NO: 1310, c. CDR-H3 comprising the amino acid sequence of SEQ ID NO: 1852, and a VL comprising the amino acid sequence of SEQ ID NO: 497.

[2641] In one aspect, the present disclosure provides an antibody or antigen-binding fragment thereof comprising at least one, at least two, or all three VL CDR sequences selected from: a. CDR-L1 comprising the amino acid sequence of SEQ ID NO: 1039, b. CDR-L2 comprising the amino acid sequence of SEQ ID NO: 1581, c. CDR-L3 comprising the amino acid sequence of SEQ ID NO: 2123, and a VH comprising the amino acid sequence of SEQ ID NO: 226.

[2642] In one aspect, an antibody or antigen-binding fragment thereof is provided, wherein the antibody or antigen-binding fragment thereof comprises a heavy chain variable domain (VH) having at least 90%, 91%, 92%, 93%, 94%, 95%, 96%, 97%, 98%, 99%, or 100% sequence identity to the amino acid sequence SEQ ID NO: 226. In some embodiments, a VH sequence having at least 90%, 91%, 92%, 93%, 94%, 95%, 96%, 97%, 98%, or 99% identity contains substitutions (e.g., conservative substitutions), insertions, or deletions relative to the reference sequence, but an antibody or antigen-binding fragment thereof comprising that sequence retains the ability to bind to same antigen as of the parent (e.g., cancer associated antigen). In some embodiments, a total of 1 to 10 amino acids have been substituted, inserted and/or deleted in the amino acid sequence SEQ ID NO: 226. In some embodiments, substitutions, insertions, or deletions occur in regions outside the CDRs (e.g., in the FRs). Optionally, the antibody or antigen-binding fragment thereof comprises the VH sequence SEQ ID NO: 226, including one or more post-translational modifications of that sequence. In a particular embodiment, the VH comprises one, two or three CDRs selected from: a. CDR-H1, comprising the amino acid sequence SEQ ID NO: 768, b. CDR-H2, comprising the amino acid sequence SEQ ID NO: 1310, and c. CDR-H3, comprising the amino acid sequence SEQ ID NO: 1852.

[2643] In one aspect, an antibody or antigen-binding fragment thereof is provided, wherein the antibody or antigen-binding fragment thereof comprises a light chain variable domain (VL) having at least 90%, 91%, 92%, 93%, 94%, 95%, 96%, 97%, 98%, 99%, or 100% sequence identity to the amino acid sequence SEQ ID NO: 497. In some embodiments, a VL sequence having at least 90%, 91%, 92%, 93%, 94%, 95%, 96%, 97%, 98%, or 99% identity contains substitutions (e.g., conservative substitutions), insertions, or deletions relative to the reference sequence, but an antibody or antigen-binding fragment thereof comprising that sequence retains the ability to bind to same antigen as the parent (e.g., cancer associated antigen). In some embodiments, a total of 1 to 10 amino acids have been substituted, inserted and/or deleted in the amino acid sequence SEQ ID NO: 497. In some embodiments, the substitutions, insertions, or deletions occur in regions outside the CDRs (e.g., in the FRs). Optionally, the antibody or antigen-binding fragment thereof comprises the VL sequence SEQ ID NO: 497, including one or more post-translational modifications of that sequence. In a particular embodiment, the VL comprises one, two or three CDRs selected from: a. CDR-L1, comprising the amino acid sequence SEQ ID NO: 1039, b. CDR-L2, comprising the amino acid sequence SEQ ID NO: 1581, and c. CDR-L3, comprising the amino acid sequence SEQ ID NO: 2123.

[2644] In one aspect, an antibody or antigen-binding fragment thereof is provided, wherein the antibody or antigen-binding fragment thereof comprises a VH as in any of the embodiments provided above, and a VL as in any of the embodiments provided above. In some embodiments, the antibody or antigen-binding fragment thereof comprises the VH amino acid sequence of SEQ ID NO: 226, and the VL amino acid sequence of SEQ ID NO: 497, optionally including post-translational modifications of those sequences.

### TSAR1005

[2645] In one aspect, the present disclosure provides an antibody or antigen-binding fragment thereof comprising at least one or both variable regions selected from: a. VH comprising the amino acid sequence of SEQ ID NO: 227 and b. VL comprising the amino acid sequence of SEQ ID NO: 498.

[2646] In one aspect, the present disclosure provides an antibody or antigen-binding fragment thereof comprising at least one, two, three, four, five, or six CDRs selected from: a. CDR-H1 comprising the amino acid sequence of SEQ ID NO: 769, b. CDR-H2 comprising the amino acid sequence of SEQ ID NO: 1311, c. CDR-H3 comprising the amino acid sequence of SEQ ID NO: 1853, d. CDR-L1 comprising the amino acid sequence of SEQ ID NO: 1040, e. CDR-L2 comprising the amino acid sequence of SEQ ID NO: 1582, and f. CDR-L3 comprising the amino acid sequence of SEQ ID NO: 2124.

[2647] In one aspect, the present disclosure provides an antibody or antigen-binding fragment thereof comprising a CDR-H3 comprising the amino acid sequence of SEQ ID NO: 1853, and a CDR-L3 comprising the amino acid sequence of SEQ ID NO: 2124.

[2648] In one aspect, the present disclosure provides an antibody or antigen-binding fragment thereof comprising at least one, at least two, or all three VH CDR sequences selected from: a. CDR-H1 comprising the amino acid sequence of SEQ ID NO: 769, b. CDR-H2 comprising the amino acid sequence of SEQ ID NO: 1311, c. CDR-H3 comprising the amino acid sequence of SEQ ID NO: 1853, and a VL comprising the amino acid sequence of SEQ ID NO: 498.

[2649] In one aspect, the present disclosure provides an antibody or antigen-binding fragment thereof comprising at least one, at least two, or all three VL CDR sequences selected from: a. CDR-L1 comprising the amino acid sequence of SEQ ID NO: 1040, b. CDR-L2 comprising the amino acid sequence of SEQ ID NO: 1582, c. CDR-L3 comprising the amino acid sequence of SEQ ID NO: 2124, and a VH comprising the amino acid sequence of SEQ ID NO: 227.

[2650] In one aspect, an antibody or antigen-binding fragment thereof is provided, wherein the antibody or antigen-binding fragment thereof comprises a heavy chain variable domain (VH) having at least 90%, 91%, 92%, 93%, 94%, 95%, 96%, 97%, 98%, 99%, or 100% sequence identity to the amino acid sequence SEQ ID NO: 227. In some embodiments, a VH sequence having at least 90%, 91%, 92%, 93%, 94%, 95%, 96%, 97%, 98%, or 99% identity contains substitutions (e.g., conservative substitutions), insertions, or deletions relative to the reference sequence, but an antibody or antigen-binding fragment thereof comprising that sequence retains the ability to bind to same antigen as of the parent (e.g., cancer associated antigen). In some embodiments, a total of 1 to 10 amino acids have been substituted, inserted and/or deleted in the amino acid sequence SEQ ID NO: 227. In some embodiments, substitutions, insertions, or deletions occur in regions outside the CDRs (e.g., in the FRs). Optionally, the antibody or antigen-binding fragment thereof comprises the VH sequence SEQ ID NO: 227, including one or more post-translational modifications of that sequence. In a particular embodiment, the VH comprises one, two or three CDRs selected from: a. CDR-H1, comprising the amino acid sequence SEQ ID NO: 769, b. CDR-H2, comprising the amino acid sequence SEQ ID NO: 1311, and c. CDR-H3, comprising the amino acid sequence SEQ ID NO: 1853.

[2651] In one aspect, an antibody or antigen-binding fragment thereof is provided, wherein the antibody or antigen-binding fragment thereof comprises a light chain variable domain (VL) having at least 90%, 91%, 92%, 93%, 94%, 95%, 96%, 97%, 98%, 99%, or 100% sequence identity to the amino acid sequence SEQ ID NO: 498. In some embodiments, a VL sequence having at least 90%, 91%, 92%, 93%, 94%, 95%, 96%, 97%, 98%, or 99% identity contains substitutions (e.g., conservative substitutions), insertions, or deletions relative to the reference sequence, but an antibody or antigen-binding fragment thereof comprising that sequence retains the ability to bind to same antigen as the parent (e.g., cancer associated antigen). In some embodiments, a total of 1 to 10 amino acids have been substituted, inserted and/or deleted in the amino acid sequence SEQ ID NO: 498. In some embodiments, the substitutions, insertions, or deletions occur in regions outside the CDRs (e.g., in the FRs). Optionally, the antibody or antigen-binding fragment thereof comprises the VL sequence SEQ ID NO: 498, including one or more post-translational modifications of that sequence. In a particular embodiment, the VL comprises one, two or three CDRs selected from: a. CDR-L1, comprising the amino acid sequence SEQ ID NO: 1040, b. CDR-L2, comprising the amino acid sequence SEQ ID NO: 1582, and c. CDR-L3, comprising the amino acid sequence SEQ ID NO: 2124.

[2652] In one aspect, an antibody or antigen-binding fragment thereof is provided, wherein the antibody or antigen-binding fragment thereof comprises a VH as in any of the embodiments provided above, and a VL as in any of the embodiments provided above. In some embodiments, the antibody or antigen-binding fragment thereof comprises the VH amino acid sequence of SEQ ID NO: 227, and the VL amino acid sequence of SEQ ID NO: 498, optionally including post-translational modifications of those sequences.

### TSAR1006

[2653] In one aspect, the present disclosure provides an antibody or antigen-binding fragment thereof comprising at least one or both variable regions selected from: a. VH comprising the amino acid sequence of SEQ ID NO: 228 and b. VL comprising the amino acid sequence of SEQ ID NO: 499.

[2654] In one aspect, the present disclosure provides an antibody or antigen-binding fragment thereof comprising at least one, two, three, four, five, or six CDRs selected from: a. CDR-H1 comprising the amino acid sequence of SEQ ID NO: 770, b. CDR-H2 comprising the amino acid sequence of SEQ ID NO: 1312, c. CDR-H3 comprising the amino acid sequence of SEQ ID NO: 1854, d. CDR-L1 comprising the amino acid sequence of SEQ ID NO: 1041, e. CDR-L2 comprising the amino acid sequence of SEQ ID NO: 1583, and f. CDR-L3 comprising the amino acid sequence of SEQ ID NO: 2125.

[2655] In one aspect, the present disclosure provides an antibody or antigen-binding fragment thereof comprising CDR-H3 comprising the amino acid sequence of SEQ ID NO: 1854, and a CDR-L3 comprising the amino acid sequence of SEQ ID NO: 2125.

[2656] In one aspect, the present disclosure provides an antibody or antigen-binding fragment thereof comprising at least one, at least two, or all three VH CDR sequences selected from: a. CDR-H1 comprising the amino acid sequence of SEQ ID NO: 770, b. CDR-H2 comprising the amino acid sequence of SEQ ID NO: 1312, c. CDR-H3 comprising the amino acid sequence of SEQ ID NO: 1854, and a VL comprising the amino acid sequence of SEQ ID NO: 499.

[2657] In one aspect, the present disclosure provides an antibody or antigen-binding fragment thereof comprising at least one, at least two, or all three VL CDR sequences selected from: a. CDR-L1 comprising the amino acid sequence of SEQ ID NO: 1041, b. CDR-L2 comprising the amino acid sequence of SEQ ID NO: 1583, c. CDR-L3 comprising the amino acid sequence of SEQ ID NO: 2125, and a VH comprising the amino acid sequence of SEQ ID NO: 228.

[2658] In one aspect, an antibody or antigen-binding fragment thereof is provided, wherein the antibody or antigen-binding fragment thereof comprises a heavy chain variable domain (VH) having at least 90%, 91%, 92%, 93%, 94%, 95%, 96%, 97%, 98%, 99%, or 100% sequence identity to the amino acid sequence SEQ ID NO: 228. In some embodiments, a VH sequence having at least 90%, 91%, 92%, 93%, 94%, 95%, 96%, 97%, 98%, or 99% identity contains substitutions (e.g., conservative substitutions), insertions, or deletions relative to the reference sequence, but an antibody or antigen-binding fragment thereof comprising that sequence retains the ability to bind to same antigen as of the parent (e.g., cancer associated antigen). In some embodiments, a total of 1 to 10 amino acids have been substituted, inserted and/or deleted in the amino acid sequence SEQ ID NO: 228. In some embodiments, substitutions, insertions, or deletions occur in regions outside the CDRs (e.g., in the FRs). Optionally, the antibody or antigen-binding fragment thereof comprises the VH sequence SEQ ID NO: 228, including one or more post-translational modifications of that sequence. In a particular embodiment, the VH comprises one, two or three CDRs selected from: a. CDR-H1, comprising the amino acid sequence SEQ ID NO: 770, b. CDR-H2, comprising the amino acid sequence SEQ ID NO: 1312, and c. CDR-H3, comprising the amino acid sequence SEQ ID NO: 1854.

[2659] In one aspect, an antibody or antigen-binding fragment thereof is provided, wherein the antibody or antigen-binding fragment thereof comprises a light chain variable domain (VL) having at least 90%, 91%, 92%, 93%, 94%, 95%, 96%, 97%, 98%, 99%, or 100% sequence identity to the amino acid sequence SEQ ID NO: 499. In some embodiments, a VL sequence having at least 90%, 91%, 92%, 93%, 94%, 95%, 96%, 97%, 98%, or 99% identity contains substitutions (e.g., conservative substitutions), insertions, or deletions relative to the reference sequence, but an antibody or antigen-binding fragment thereof comprising that sequence retains the ability to bind to same antigen as the parent (e.g., cancer associated antigen). In some embodiments, a total of 1 to 10 amino acids have been substituted, inserted and/or deleted in the amino acid sequence SEQ ID NO: 499. In some embodiments, the substitutions, insertions, or deletions occur in regions outside the CDRs (e.g., in the FRs). Optionally, the antibody or antigen-binding fragment thereof comprises the VL sequence SEQ ID NO: 499, including one or more post-translational modifications of that sequence. In a particular embodiment, the VL comprises one, two or three CDRs selected from: a. CDR-L1, comprising the amino acid sequence SEQ ID NO: 1041, b. CDR-L2, comprising the amino acid sequence SEQ ID NO: 1583, and c. CDR-L3, comprising the amino acid sequence SEQ ID NO: 2125.

[2660] In one aspect, an antibody or antigen-binding fragment thereof is provided, wherein the antibody or antigen-binding fragment thereof comprises a VH as in any of the embodiments provided above, and a VL as in any of the embodiments provided above. In some embodiments, the antibody or antigen-binding fragment thereof comprises the VH amino acid sequence of SEQ ID NO: 228, and the VL amino acid sequence of SEQ ID NO: 499, optionally including post-translational modifications of those sequences.

### TSAR1007

[2661] In one aspect, the present disclosure provides an antibody or antigen-binding fragment thereof comprising at least one or both variable regions selected from: a. VH comprising the amino acid sequence of SEQ ID NO: 229 and b. VL comprising the amino acid sequence of SEQ ID NO: 500.

[2662] In one aspect, the present disclosure provides an antibody or antigen-binding fragment thereof comprising at least one, two, three, four, five, or six CDRs selected from: a. CDR-H1 comprising the amino acid sequence of SEQ ID NO: 771, b. CDR-H2 comprising the amino acid sequence of SEQ ID NO: 1313, c. CDR-H3 comprising the amino acid sequence of SEQ ID NO: 1855, d. CDR-L1 comprising the amino acid sequence of SEQ ID NO: 1042, e. CDR-L2 comprising the amino acid sequence of SEQ ID NO: 1584, and f. CDR-L3 comprising the amino acid sequence of SEQ ID NO: 2126.

[2663] In one aspect, the present disclosure provides an antibody or antigen-binding fragment thereof comprising a CDR-H3 comprising the amino acid sequence of SEQ ID NO: 1855, and a CDR-L3 comprising the amino acid sequence of SEQ ID NO: 2126.

[2664] In one aspect, the present disclosure provides an antibody or antigen-binding fragment thereof comprising at least one, at least two, or all three VH CDR sequences selected from: a. CDR-H1 comprising the amino acid sequence of SEQ ID NO: 771, b. CDR-H2 comprising the amino acid sequence of SEQ ID NO: 1313, c. CDR-H3 comprising the amino acid sequence of SEQ ID NO: 1855, and a VL comprising the amino acid sequence of SEQ ID NO: 500.

[2665] In one aspect, the present disclosure provides an antibody or antigen-binding fragment thereof comprising at least one, at least two, or all three VL CDR sequences selected from: a. CDR-L1 comprising the amino acid sequence of SEQ ID NO: 1042, b. CDR-L2 comprising the amino acid sequence of SEQ ID NO: 1584, c. CDR-L3 comprising the amino acid sequence of SEQ ID NO: 2126, and a VH comprising the amino acid sequence of SEQ ID NO: 229.

[2666] In one aspect, an antibody or antigen-binding fragment thereof is provided, wherein the antibody or antigen-binding fragment thereof comprises a heavy chain variable domain (VH) having at least 90%, 91%, 92%, 93%, 94%, 95%, 96%, 97%, 98%, 99%, or 100% sequence identity to the amino acid sequence SEQ ID NO: 229. In some embodiments, a VH sequence having at least 90%, 91%, 92%, 93%, 94%, 95%, 96%, 97%, 98%, or 99% identity contains substitutions (e.g., conservative substitutions), insertions, or deletions relative to the reference sequence, but an antibody or antigen-binding fragment thereof comprising that sequence retains the ability to bind to same antigen as of the parent (e.g., cancer associated antigen). In some embodiments, a total of 1 to 10 amino acids have been substituted, inserted and/or deleted in the amino acid sequence SEQ ID NO: 229. In some embodiments, substitutions, insertions, or deletions occur in regions outside the CDRs (e.g., in the FRs). Optionally, the antibody or antigen-binding fragment thereof comprises the VH sequence SEQ ID NO: 229, including one or more post-translational modifications of that sequence. In a particular embodiment, the VH comprises one, two or three CDRs selected from: a. CDR-H1, comprising the amino acid sequence SEQ ID NO: 771, b. CDR-H2, comprising the amino acid sequence SEQ ID NO: 1313, and c. CDR-H3, comprising the amino acid sequence SEQ ID NO: 1855.

[2667] In one aspect, an antibody or antigen-binding fragment thereof is provided, wherein the antibody or antigen-binding fragment thereof comprises a light chain variable domain (VL) having at least 90%, 91%, 92%, 93%, 94%, 95%, 96%, 97%, 98%, 99%, or 100% sequence identity to the amino acid sequence SEQ ID NO: 500. In some embodiments, a VL sequence having at least 90%, 91%, 92%, 93%, 94%, 95%, 96%, 97%, 98%, or 99% identity contains substitutions (e.g., conservative substitutions), insertions, or deletions relative to the reference sequence, but an antibody or antigen-binding fragment thereof comprising that sequence retains the ability to bind to same antigen as the parent (e.g., cancer associated antigen). In some embodiments, a total of 1 to 10 amino acids have been substituted, inserted and/or deleted in the amino acid sequence SEQ ID NO: 500. In some embodiments, the substitutions, insertions, or deletions occur in regions outside the CDRs (e.g., in the FRs). Optionally, the antibody or antigen-binding fragment thereof comprises the VL sequence SEQ ID NO: 500, including one or more post-translational modifications of that sequence. In a particular embodiment, the VL comprises one, two or three CDRs selected from: a. CDR-L1, comprising the amino acid sequence SEQ ID NO: 1042, b CDR-L2, comprising the amino acid sequence SEQ ID NO: 1584, and c. CDR-L3, comprising the amino acid sequence SEQ ID NO: 2126.

[2668] In one aspect, an antibody or antigen-binding fragment thereof is provided, wherein the antibody or antigen-binding fragment thereof comprises a VH as in any of the embodiments provided above, and a VL as in any of the embodiments provided above. In some embodiments, the antibody or antigen-binding fragment thereof comprises the VH amino acid sequence of SEQ ID NO: 229, and the VL amino acid sequence of SEQ ID NO: 500, optionally including post-translational modifications of those sequences.

### TSAR1008

[2669] In one aspect, the present disclosure provides an antibody or antigen-binding fragment thereof comprising at least one or both variable regions selected from: a. VH comprising the amino acid sequence of SEQ ID NO: 230 and b. VL comprising the amino acid sequence of SEQ ID NO: 501.

[2670] In one aspect, the present disclosure provides an antibody or antigen-binding fragment thereof comprising at least one, two, three, four, five, or six CDRs selected from: a. CDR-H1 comprising the amino acid sequence of SEQ ID NO: 772, b. CDR-H2 comprising the amino acid sequence of SEQ ID NO: 1314, c. CDR-H3 comprising the amino acid sequence of SEQ ID NO: 1856, d. CDR-L1 comprising the amino acid sequence of SEQ ID NO: 1043, e. CDR-L2 comprising the amino acid sequence of SEQ ID NO: 1585, and f. CDR-L3 comprising the amino acid sequence of SEQ ID NO: 2127.

[2671] In one aspect, the present disclosure provides an antibody or antigen-binding fragment thereof comprising a CDR-H3 comprising the amino acid sequence of SEQ ID NO: 1856, and a CDR-L3 comprising the amino acid sequence of SEQ ID NO: 2127.

[2672] In one aspect, the present disclosure provides an antibody or antigen-binding fragment thereof comprising at least one, at least two, or all three VH CDR sequences selected from: a. CDR-H1 comprising the amino acid sequence of SEQ ID NO: 772, b. CDR-H2 comprising the amino acid sequence of SEQ ID NO: 1314, c. CDR-H3 comprising the amino acid sequence of SEQ ID NO: 1856, and a VL comprising the amino acid sequence of SEQ ID NO: 501.

[2673] In one aspect, the present disclosure provides an antibody or antigen-binding fragment thereof comprising at least one, at least two, or all three VL CDR sequences selected from: a. CDR-L1 comprising the amino acid sequence of SEQ ID NO: 1043, b. CDR-L2 comprising the amino acid sequence of SEQ ID NO: 1585, c. CDR-L3 comprising the amino acid sequence of SEQ ID NO: 2127, and a VH comprising the amino acid sequence of SEQ ID NO: 230.

[2674] In one aspect, an antibody or antigen-binding fragment thereof is provided, wherein the antibody or antigen-binding fragment thereof comprises a heavy chain variable domain (VH) having at least 90%, 91%, 92%, 93%, 94%, 95%, 96%, 97%, 98%, 99%, or 100% sequence identity to the amino acid sequence SEQ ID NO: 230. In some embodiments, a VH sequence having at least 90%, 91%, 92%, 93%, 94%, 95%, 96%, 97%, 98%, or 99% identity contains substitutions (e.g., conservative substitutions), insertions, or deletions relative to the reference sequence, but an antibody or antigen-binding fragment thereof comprising that sequence retains the ability to bind to same antigen as of the parent (e.g., cancer associated antigen). In some embodiments, a total of 1 to 10 amino acids have been substituted, inserted and/or deleted in the amino acid sequence SEQ ID NO: 230. In some embodiments, substitutions, insertions, or deletions occur in regions outside the CDRs (e.g., in the FRs). Optionally, the antibody or antigen-binding fragment thereof comprises the VH sequence SEQ ID NO: 230, including one or more post-translational modifications of that sequence. In a particular embodiment, the VH comprises one, two or three CDRs selected from: a. CDR-H1, comprising the amino acid sequence SEQ ID NO: 772, b. CDR-H2, comprising the amino acid sequence SEQ ID NO: 1314, and c. CDR-H3, comprising the amino acid sequence SEQ ID NO: 1856.

[2675] In one aspect, an antibody or antigen-binding fragment thereof is provided, wherein the antibody or antigen-binding fragment thereof comprises a light chain variable domain (VL) having at least 90%, 91%, 92%, 93%, 94%, 95%, 96%, 97%, 98%, 99%, or 100% sequence identity to the amino acid sequence SEQ ID NO: 501. In some embodiments, a VL sequence having at least 90%, 91%, 92%, 93%, 94%, 95%, 96%, 97%, 98%, or 99% identity contains substitutions (e.g., conservative substitutions), insertions, or deletions relative to the reference sequence, but an antibody or antigen-binding fragment thereof comprising that sequence retains the ability to bind to same antigen as the parent (e.g., cancer associated antigen). In some embodiments, a total of 1 to 10 amino acids have been substituted, inserted and/or deleted in the amino acid sequence SEQ ID NO: 501. In some embodiments, the substitutions, insertions, or deletions occur in regions outside the CDRs (e.g., in the FRs). Optionally, the antibody or antigen-binding fragment thereof comprises the VL sequence SEQ ID NO: 501, including one or more post-translational modifications of that sequence. In a particular embodiment, the VL comprises one, two or three CDRs selected from: a. CDR-L1, comprising the amino acid sequence SEQ ID NO: 1043, b. CDR-L2, comprising the amino acid sequence SEQ ID NO: 1585, and c. CDR-L3, comprising the amino acid sequence SEQ ID NO: 2127.

[2676] In one aspect, an antibody or antigen-binding fragment thereof is provided, wherein the antibody or antigen-binding fragment thereof comprises a VH as in any of the embodiments provided above, and a VL as in any of the embodiments provided above. In some embodiments, the antibody or antigen-binding fragment thereof comprises the VH amino acid sequence of SEQ ID NO: 230, and the VL amino acid sequence of SEQ ID NO: 501, optionally including post-translational modifications of those sequences.

### TSTO1001

[2677] In one aspect, the present disclosure provides an antibody or antigen-binding fragment thereof comprising at least one or both variable regions selected from: a. VH comprising the amino acid sequence of SEQ ID NO: 231 and b. VL comprising the amino acid sequence of SEQ ID NO: 502.

[2678] In one aspect, the present disclosure provides an antibody or antigen-binding fragment thereof comprising at least one, two, three, four, five, or six CDRs selected from: a. CDR-H1 comprising the amino acid sequence of SEQ ID NO: 773, b. CDR-H2 comprising the amino acid sequence of SEQ ID NO: 1315, c. CDR-H3 comprising the amino acid sequence of SEQ ID NO: 1857, d. CDR-L1 comprising the amino acid sequence of SEQ ID NO: 1044, e. CDR-L2 comprising the amino acid sequence of SEQ ID NO: 1586, and f. CDR-L3 comprising the amino acid sequence of SEQ ID NO: 2128.

[2679] In one aspect, the present disclosure provides an antibody or antigen-binding fragment thereof comprising a CDR-H3 comprising the amino acid sequence of SEQ ID NO: 1857, and a CDR-L3 comprising the amino acid sequence of SEQ ID NO: 2128.

[2680] In one aspect, the present disclosure provides an antibody or antigen-binding fragment thereof comprising at least one, at least two, or all three VH CDR sequences selected from: a. CDR-H1 comprising the amino acid sequence of SEQ ID NO: 773, b. CDR-H2 comprising the amino acid sequence of SEQ ID NO: 1315, c. CDR-H3 comprising the amino acid sequence of SEQ ID NO: 1857, and a VL comprising the amino acid sequence of SEQ ID NO: 502.

[2681] In one aspect, the present disclosure provides an antibody or antigen-binding fragment thereof comprising at least one, at least two, or all three VL CDR sequences selected from: a. CDR-L1 comprising the amino acid sequence of SEQ ID NO: 1044, b. CDR-L2 comprising the amino acid sequence of SEQ ID NO: 1586, c. CDR-L3 comprising the amino acid sequence of SEQ ID NO: 2128, and a VH comprising the amino acid sequence of SEQ ID NO: 231.

[2682] In one aspect, an antibody or antigen-binding fragment thereof is provided, wherein the antibody or antigen-binding fragment thereof comprises a heavy chain variable domain (VH) having at least 90%, 91%, 92%, 93%, 94%, 95%, 96%, 97%, 98%, 99%, or 100% sequence identity to the amino acid sequence SEQ ID NO: 231. In some embodiments, a VH sequence having at least 90%, 91%, 92%, 93%, 94%, 95%, 96%, 97%, 98%, or 99% identity contains substitutions (e.g., conservative substitutions), insertions, or deletions relative to the reference sequence, but an antibody or antigen-binding fragment thereof comprising that sequence retains the ability to bind to same antigen as of the parent (e.g., cancer associated antigen). In some embodiments, a total of 1 to 10 amino acids have been substituted, inserted and/or deleted in the amino acid sequence SEQ ID NO: 231. In some embodiments, substitutions, insertions, or deletions occur in regions outside the CDRs (e.g., in the FRs). Optionally, the antibody or antigen-binding fragment thereof comprises the VH sequence SEQ ID NO: 231, including one or more post-translational modifications of that sequence. In a particular embodiment, the VH comprises one, two or three CDRs selected from: a. CDR-H1, comprising the amino acid sequence SEQ ID NO: 773, b. CDR-H2, comprising the amino acid sequence SEQ ID NO: 1315, and c. CDR-H3, comprising the amino acid sequence SEQ ID NO: 1857.

[2683] In one aspect, an antibody or antigen-binding fragment thereof is provided, wherein the antibody or antigen-binding fragment thereof comprises a light chain variable domain (VL) having at least 90%, 91%, 92%, 93%, 94%, 95%, 96%, 97%, 98%, 99%, or 100% sequence identity to the amino acid sequence SEQ ID NO: 502. In some embodiments, a VL sequence having at least 90%, 91%, 92%, 93%, 94%, 95%, 96%, 97%, 98%, or 99% identity contains substitutions (e.g., conservative substitutions), insertions, or deletions relative to the reference sequence, but an antibody or antigen-binding fragment thereof comprising that sequence retains the ability to bind to same antigen as the parent (e.g., cancer associated antigen). In some embodiments, a total of 1 to 10 amino acids have been substituted, inserted and/or deleted in the amino acid sequence SEQ ID NO: 502. In some embodiments, the substitutions, insertions, or deletions occur in regions outside the CDRs (e.g., in the FRs). Optionally, the antibody or antigen-binding fragment thereof comprises the VL sequence SEQ ID NO: 502, including one or more post-translational modifications of that sequence. In a particular embodiment, the VL comprises one, two or three CDRs selected from: a. CDR-L1, comprising the amino acid sequence SEQ ID NO: 1044, b. CDR-L2, comprising the amino acid sequence SEQ ID NO: 1586, and c. CDR-L3, comprising the amino acid sequence SEQ ID NO: 2128.

[2684] In one aspect, an antibody or antigen-binding fragment thereof is provided, wherein the antibody or antigen-binding fragment thereof comprises a VH as in any of the embodiments provided above, and a VL as in any of the embodiments provided above. In some embodiments, the antibody or antigen-binding fragment thereof comprises the VH amino acid sequence of SEQ ID NO: 231, and the VL amino acid sequence of SEQ ID NO: 502, optionally including post-translational modifications of those sequences.

### TSTO1002

[2685] In one aspect, the present disclosure provides an antibody or antigen-binding fragment thereof comprising at least one or both variable regions selected from: a. VH comprising the amino acid sequence of SEQ ID NO: 232 and b. VL comprising the amino acid sequence of SEQ ID NO: 503.

[2686] In one aspect, the present disclosure provides an antibody or antigen-binding fragment thereof comprising at least one, two, three, four, five, or six CDRs selected from: a. CDR-H1 comprising the amino acid sequence of SEQ ID NO: 774, b. CDR-H2 comprising the amino acid sequence of SEQ ID NO: 1316, c. CDR-H3 comprising the amino acid sequence of SEQ ID NO: 1858, d. CDR-L1 comprising the amino acid sequence of SEQ ID NO: 1045, e. CDR-L2 comprising the amino acid sequence of SEQ ID NO: 1587, and f. CDR-L3 comprising the amino acid sequence of SEQ ID NO: 2129.

[2687] In one aspect, the present disclosure provides an antibody or antigen-binding fragment thereof comprising a CDR-H3 comprising the amino acid sequence of SEQ ID NO: 1858, and a CDR-L3 comprising the amino acid sequence of SEQ ID NO: 2129.

[2688] In one aspect, the present disclosure provides an antibody or antigen-binding fragment thereof comprising at least one, at least two, or all three VH CDR sequences selected from: a. CDR-H1 comprising the amino acid sequence of SEQ ID NO: 774, b. CDR-H2 comprising the amino acid sequence of SEQ ID NO: 1316, c. CDR-H3 comprising the amino acid sequence of SEQ ID NO: 1858, and a VL comprising the amino acid sequence of SEQ ID NO: 503.

[2689] In one aspect, the present disclosure provides an antibody or antigen-binding fragment thereof comprising at least one, at least two, or all three VL CDR sequences selected from: a. CDR-L1 comprising the amino acid sequence of SEQ ID NO: 1045, b. CDR-L2 comprising the amino acid sequence of SEQ ID NO: 1587, c. CDR-L3 comprising the amino acid sequence of SEQ ID NO: 2129, and a VH comprising the amino acid sequence of SEQ ID NO: 232.

[2690] In one aspect, an antibody or antigen-binding fragment thereof is provided, wherein the antibody or antigen-binding fragment thereof comprises a heavy chain variable domain (VH) having at least 90%, 91%, 92%, 93%, 94%, 95%, 96%, 97%, 98%, 99%, or 100% sequence identity to the amino acid sequence SEQ ID NO: 232. In some embodiments, a VH sequence having at least 90%, 91%, 92%, 93%, 94%, 95%, 96%, 97%, 98%, or 99% identity contains substitutions (e.g., conservative substitutions), insertions, or deletions relative to the reference sequence, but an antibody or antigen-binding fragment thereof comprising that sequence retains the ability to bind to same antigen as of the parent (e.g., cancer associated antigen). In some embodiments, a total of 1 to 10 amino acids have been substituted, inserted and/or deleted in the amino acid sequence SEQ ID NO: 232. In some embodiments, substitutions, insertions, or deletions occur in regions outside the CDRs (e.g., in the FRs). Optionally, the antibody or antigen-binding fragment thereof comprises the VH sequence SEQ ID NO: 232, including one or more post-translational modifications of that sequence. In a particular embodiment, the VH comprises one, two or three CDRs selected from: a. CDR-H1, comprising the amino acid sequence SEQ ID NO: 774, b. CDR-H2, comprising the amino acid sequence SEQ ID NO: 1316, and c. CDR-H3, comprising the amino acid sequence SEQ ID NO: 1858.

[2691] In one aspect, an antibody or antigen-binding fragment thereof is provided, wherein the antibody or antigen-binding fragment thereof comprises a light chain variable domain (VL) having at least 90%, 91%, 92%, 93%, 94%, 95%, 96%, 97%, 98%, 99%, or 100% sequence identity to the amino acid sequence SEQ ID NO: 503. In some embodiments, a VL sequence having at least 90%, 91%, 92%, 93%, 94%, 95%, 96%, 97%, 98%, or 99% identity contains substitutions (e.g., conservative substitutions), insertions, or deletions relative to the reference sequence, but an antibody or antigen-binding fragment thereof comprising that sequence retains the ability to bind to same antigen as the parent (e.g., cancer associated antigen). In some embodiments, a total of 1 to 10 amino acids have been substituted, inserted and/or deleted in the amino acid sequence SEQ ID NO: 503. In some embodiments, the substitutions, insertions, or deletions occur in regions outside the CDRs (e.g., in the FRs). Optionally, the antibody or antigen-binding fragment thereof comprises the VL sequence SEQ ID NO: 503, including one or more post-translational modifications of that sequence. In a particular embodiment, the VL comprises one, two or three CDRs selected from: a. CDR-L1, comprising the amino acid sequence SEQ ID NO: 1045, b. CDR-L2, comprising the amino acid sequence SEQ ID NO: 1587, and c. CDR-L3, comprising the amino acid sequence SEQ ID NO: 2129.

[2692] In one aspect, an antibody or antigen-binding fragment thereof is provided, wherein the antibody or antigen-binding fragment thereof comprises a VH as in any of the embodiments provided above, and a VL as in any of the embodiments provided above. In some embodiments, the antibody or antigen-binding fragment thereof comprises the VH amino acid sequence of SEQ ID NO: 232, and the VL amino acid sequence of SEQ ID NO: 503, optionally including post-translational modifications of those sequences.

### TSTO1003

[2693] In one aspect, the present disclosure provides an antibody or antigen-binding fragment thereof comprising at least one or both variable regions selected from: a. VH comprising the amino acid sequence of SEQ ID NO: 233 and b. VL comprising the amino acid sequence of SEQ ID NO: 504.

[2694] In one aspect, the present disclosure provides an antibody or antigen-binding fragment thereof comprising at least one, two, three, four, five, or six CDRs selected from: a. CDR-H1 comprising the amino acid sequence of SEQ ID NO: 775, b. CDR-H2 comprising the amino acid sequence of SEQ ID NO: 1317, c. CDR-H3 comprising the amino acid sequence of SEQ ID NO: 1859, d. CDR-L1 comprising the amino acid sequence of SEQ ID NO: 1046, e. CDR-L2 comprising the amino acid sequence of SEQ ID NO: 1588, and f. CDR-L3 comprising the amino acid sequence of SEQ ID NO: 2130.

[2695] In one aspect, the present disclosure provides an antibody or antigen-binding fragment thereof comprising a CDR-H3 comprising the amino acid sequence of SEQ ID NO: 1859, and a CDR-L3 comprising the amino acid sequence of SEQ ID NO: 2130.

[2696] In one aspect, the present disclosure provides an antibody or antigen-binding fragment thereof comprising at least one, at least two, or all three VH CDR sequences selected from: a. CDR-H1 comprising the amino acid sequence of SEQ ID NO: 775, b. CDR-H2 comprising the amino acid sequence of SEQ ID NO: 1317, c. CDR-H3 comprising the amino acid sequence of SEQ ID NO: 1859, and d VL comprising the amino acid sequence of SEQ ID NO: 504.

[2697] In one aspect, the present disclosure provides an antibody or antigen-binding fragment thereof comprising at least one, at least two, or all three VL CDR sequences selected from: a. CDR-L1 comprising the amino acid sequence of SEQ ID NO: 1046, b. CDR-L2 comprising the amino acid sequence of SEQ ID NO: 1588, c. CDR-L3 comprising the amino acid sequence of SEQ ID NO: 2130, and a VH comprising the amino acid sequence of SEQ ID NO: 233.

[2698] In one aspect, an antibody or antigen-binding fragment thereof is provided, wherein the antibody or antigen-binding fragment thereof comprises a heavy chain variable domain (VH) having at least 90%, 91%, 92%, 93%, 94%, 95%, 96%, 97%, 98%, 99%, or 100% sequence identity to the amino acid sequence SEQ ID NO: 233. In some embodiments, a VH sequence having at least 90%, 91%, 92%, 93%, 94%, 95%, 96%, 97%, 98%, or 99% identity contains substitutions (e.g., conservative substitutions), insertions, or deletions relative to the reference sequence, but an antibody or antigen-binding fragment thereof comprising that sequence retains the ability to bind to same antigen as of the parent (e.g., cancer associated antigen). In some embodiments, a total of 1 to 10 amino acids have been substituted, inserted and/or deleted in the amino acid sequence SEQ ID NO: 233. In some embodiments, substitutions, insertions, or deletions occur in regions outside the CDRs (e.g., in the FRs). Optionally, the antibody or antigen-binding fragment thereof comprises the VH sequence SEQ ID NO: 233, including one or more post-translational modifications of that sequence. In a particular embodiment, the VH comprises one, two or three CDRs selected from: a. CDR-H1, comprising the amino acid sequence SEQ ID NO: 775, b. CDR-H2, comprising the amino acid sequence SEQ ID NO: 1317, and c. CDR-H3, comprising the amino acid sequence SEQ ID NO: 1859.

[2699] In one aspect, an antibody or antigen-binding fragment thereof is provided, wherein the antibody or antigen-binding fragment thereof comprises a light chain variable domain (VL) having at least 90%, 91%, 92%, 93%, 94%, 95%, 96%, 97%, 98%, 99%, or 100% sequence identity to the amino acid sequence SEQ ID NO: 504. In some embodiments, a VL sequence having at least 90%, 91%, 92%, 93%, 94%, 95%, 96%, 97%, 98%, or 99% identity contains substitutions (e.g., conservative substitutions), thereof comprising that sequence retains the ability to bind to same antigen as the parent (e.g., cancer associated antigen). In some embodiments, a total of 1 to 10 amino acids have been substituted, inserted and/or deleted in the amino acid sequence SEQ ID NO: 504. In some embodiments, the substitutions, insertions, or deletions occur in regions outside the CDRs (e.g., in the FRs). Optionally, the antibody or antigen-binding fragment thereof comprises the VL sequence SEQ ID NO: 504, including one or more post-translational modifications of that sequence. In a particular embodiment, the VL comprises one, two or three CDRs selected from: a. CDR-L1, comprising the amino acid sequence SEQ ID NO: 1046, b. CDR-L2, comprising the amino acid sequence SEQ ID NO: 1588, and c. CDR-L3, comprising the amino acid sequence SEQ ID NO: 2130.

[2700] In one aspect, an antibody or antigen-binding fragment thereof is provided, wherein the antibody or antigen-binding fragment thereof comprises a VH as in any of the embodiments provided above, and a VL as in any of the embodiments provided above. In some embodiments, the antibody or antigen-binding fragment thereof comprises the VH amino acid sequence of SEQ ID NO: 233, and the VL amino acid sequence of SEQ ID NO: 504, optionally including post-translational modifications of those sequences.

### TSTO1004

[2701] In one aspect, the present disclosure provides an antibody or antigen-binding fragment thereof comprising at least one or both variable regions selected from: a. VH comprising the amino acid sequence of SEQ ID NO: 234 and b. VL comprising the amino acid sequence of SEQ ID NO: 505.

[2702] In one aspect, the present disclosure provides an antibody or antigen-binding fragment thereof comprising at least one, two, three, four, five, or six CDRs selected from: a. CDR-H1 comprising the amino acid sequence of SEQ ID NO: 776, b. CDR-H2 comprising the amino acid sequence of SEQ ID NO: 1318, c. CDR-H3 comprising the amino acid sequence of SEQ ID NO: 1860, d. CDR-L1 comprising the amino acid sequence of SEQ ID NO: 1047, e. CDR-L2 comprising the amino acid sequence of SEQ ID NO: 1589, and f. CDR-L3 comprising the amino acid sequence of SEQ ID NO: 2131.

[2703] In one aspect, the present disclosure provides an antibody or antigen-binding fragment thereof comprising a CDR-H3 comprising the amino acid sequence of SEQ ID NO: 1860, and a CDR-L3 comprising the amino acid sequence of SEQ ID NO: 2131.

[2704] In one aspect, the present disclosure provides an antibody or antigen-binding fragment thereof comprising at least one, at least two, or all three VH CDR sequences selected from: a. CDR-H1 comprising the amino acid sequence of SEQ ID NO: 776, b. CDR-H2 comprising the amino acid sequence of SEQ ID NO: 1318, c. CDR-H3 comprising the amino acid sequence of SEQ ID NO: 1860, and a VL comprising the amino acid sequence of SEQ ID NO: 505.

[2705] In one aspect, the present disclosure provides an antibody or antigen-binding fragment thereof comprising at least one, at least two, or all three VL CDR sequences selected from: a. CDR-L1 comprising the amino acid sequence of SEQ ID NO: 104, b. CDR-L2 comprising the amino acid sequence of SEQ ID NO: 1589, c. CDR-L3 comprising the amino acid sequence of SEQ ID NO: 2131, and a VH comprising the amino acid sequence of SEQ ID NO: 234.

[2706] In one aspect, an antibody or antigen-binding fragment thereof is provided, wherein the antibody or antigen-binding fragment thereof comprises a heavy chain variable domain (VH) having at least 90%, 91%, 92%, 93%, 94%, 95%, 96%, 97%, 98%, 99%, or 100% sequence identity to the amino acid sequence SEQ ID NO: 234. In some embodiments, a VH sequence having at least 90%, 91%, 92%, 93%, 94%, 95%, 96%, 97%, 98%, or 99% identity contains substitutions (e.g., conservative substitutions), insertions, or deletions relative to the reference sequence, but an antibody or antigen-binding fragment thereof comprising that sequence retains the ability to bind to same antigen as of the parent (e.g., cancer associated antigen). In some embodiments, a total of 1 to 10 amino acids have been substituted, inserted and/or deleted in the amino acid sequence SEQ ID NO: 234. In some embodiments, substitutions, insertions, or deletions occur in regions outside the CDRs (e.g., in the FRs). Optionally, the antibody or antigen-binding fragment thereof comprises the VH sequence SEQ ID NO: 234, including one or more post-translational modifications of that sequence. In a particular embodiment, the VH comprises one, two or three CDRs selected from: a. CDR-H1, comprising the amino acid sequence SEQ ID NO: 776, b. CDR-H2, comprising the amino acid sequence SEQ ID NO: 1318, and c. CDR-H3, comprising the amino acid sequence SEQ ID NO: 1860.

[2707] In one aspect, an antibody or antigen-binding fragment thereof is provided, wherein the antibody or antigen-binding fragment thereof comprises a light chain variable domain (VL) having at least 90%, 91%, 92%, 93%, 94%, 95%, 96%, 97%, 98%, 99%, or 100% sequence identity to the amino acid sequence SEQ ID NO: 505. In some embodiments, a VL sequence having at least 90%, 91%, 92%, 93%, 94%, 95%, 96%, 97%, 98%, or 99% identity contains substitutions (e.g., conservative substitutions), insertions, or deletions relative to the reference sequence, but an antibody or antigen-binding fragment thereof comprising that sequence retains the ability to bind to same antigen as the parent (e.g., cancer associated antigen). In some embodiments, a total of 1 to 10 amino acids have been substituted, inserted and/or deleted in the amino acid sequence SEQ ID NO: 505. In some embodiments, the substitutions, insertions, or deletions occur in regions outside the CDRs (e.g., in the FRs). Optionally, the antibody or antigen-binding fragment thereof comprises the VL sequence SEQ ID NO: 505, including one or more post-translational modifications of that sequence. In a particular embodiment, the VL comprises one, two or three CDRs selected from: a. CDR-L1, comprising the amino acid sequence SEQ ID NO: 1047, b. CDR-L2, comprising the amino acid sequence SEQ ID NO: 1589, and c. CDR-L3, comprising the amino acid sequence SEQ ID NO: 2131.

[2708] In one aspect, an antibody or antigen-binding fragment thereof is provided, wherein the antibody or antigen-binding fragment thereof comprises a VH as in any of the embodiments provided above, and a VL as in any of the embodiments provided above. In some embodiments, the antibody or antigen-binding fragment thereof comprises the VH amino acid sequence of SEQ ID NO: 234, and the VL amino acid sequence of SEQ ID NO: 505, optionally including post-translational modifications of those sequences.

### TSTO1005

[2709] In one aspect, the present disclosure provides an antibody or antigen-binding fragment thereof comprising at least one or both variable regions selected from: a. VH comprising the amino acid sequence of SEQ ID NO: 235 and b. VL comprising the amino acid sequence of SEQ ID NO: 506.

[2710] In one aspect, the present disclosure provides an antibody or antigen-binding fragment thereof comprising at least one, two, three, four, five, or six CDRs selected from: a. CDR-H1 comprising the amino acid sequence of SEQ ID NO: 777, b. CDR-H2 comprising the amino acid sequence of SEQ ID NO: 1319, c. CDR-H3 comprising the amino acid sequence of SEQ ID NO: 1861, d. CDR-L1 comprising the amino acid sequence of SEQ ID NO: 1048, e. CDR-L2 comprising the amino acid sequence of SEQ ID NO: 1590, and f. CDR-L3 comprising the amino acid sequence of SEQ ID NO: 2132.

[2711] In one aspect, the present disclosure provides an antibody or antigen-binding fragment thereof comprising a CDR-H3 comprising the amino acid sequence of SEQ ID NO: 1861, and a CDR-L3 comprising the amino acid sequence of SEQ ID NO: 2132.

[2712] In one aspect, the present disclosure provides an antibody or antigen-binding fragment thereof comprising at least one, at least two, or all three VH CDR sequences selected from: a. CDR-H1 comprising the amino acid sequence of SEQ ID NO: 777, b. CDR-H2 comprising the amino acid sequence of SEQ ID NO: 1319, c. CDR-H3 comprising the amino acid sequence of SEQ ID NO: 1861, and a VL comprising the amino acid sequence of SEQ ID NO: 506.

[2713] In one aspect, the present disclosure provides an antibody or antigen-binding fragment thereof comprising at least one, at least two, or all three VL CDR sequences selected from: a. CDR-L1 comprising the amino acid sequence of SEQ ID NO: 1048, b. CDR-L2 comprising the amino acid sequence of SEQ ID NO: 1590, c. CDR-L3 comprising the amino acid sequence of SEQ ID NO: 2132, and a VH comprising the amino acid sequence of SEQ ID NO: 235.

[2714] In one aspect, an antibody or antigen-binding fragment thereof is provided, wherein the antibody or antigen-binding fragment thereof comprises a heavy chain variable domain (VH) having at least 90%, 91%, 92%, 93%, 94%, 95%, 96%, 97%, 98%, 99%, or 100% sequence identity to the amino acid sequence SEQ ID NO: 235. In some embodiments, a VH sequence having at least 90%, 91%, 92%, 93%, 94%, 95%, 96%, 97%, 98%, or 99% identity contains substitutions (e.g., conservative substitutions), insertions, or deletions relative to the reference sequence, but an antibody or antigen-binding fragment thereof comprising that sequence retains the ability to bind to same antigen as of the parent (e.g., cancer associated antigen). In some embodiments, a total of 1 to 10 amino acids have been substituted, inserted and/or deleted in the amino acid sequence SEQ ID NO: 235. In some embodiments, substitutions, insertions, or deletions occur in regions outside the CDRs (e.g., in the FRs). Optionally, the antibody or antigen-binding fragment thereof comprises the VH sequence SEQ ID NO: 235, including one or more post-translational modifications of that sequence. In a particular embodiment, the VH comprises one, two or three CDRs selected from: a. CDR-H1, comprising the amino acid sequence SEQ ID NO: 777, b. CDR-H2, comprising the amino acid sequence SEQ ID NO: 1319, and c. CDR-H3, comprising the amino acid sequence SEQ ID NO: 1861.

[2715] In one aspect, an antibody or antigen-binding fragment thereof is provided, wherein the antibody or antigen-binding fragment thereof comprises a light chain variable domain (VL) having at least 90%, 91%, 92%, 93%, 94%, 95%, 96%, 97%, 98%, 99%, or 100% sequence identity to the amino acid sequence SEQ ID NO: 506. In some embodiments, a VL sequence having at least 90%, 91%, 92%, 93%, 94%, 95%, 96%, 97%, 98%, or 99% identity contains substitutions (e.g., conservative substitutions), insertions, or deletions relative to the reference sequence, but an antibody or antigen-binding fragment thereof comprising that sequence retains the ability to bind to same antigen as the parent (e.g., cancer associated antigen). In some embodiments, a total of 1 to 10 amino acids have been substituted, inserted and/or deleted in the amino acid sequence SEQ ID NO: 506. In some embodiments, the substitutions, insertions, or deletions occur in regions outside the CDRs (e.g., in the FRs). Optionally, the antibody or antigen-binding fragment thereof comprises the VL sequence SEQ ID NO: 506, including one or more post-translational modifications of that sequence. In a particular embodiment, the VL comprises one, two or three CDRs selected from: a. CDR-L1, comprising the amino acid sequence SEQ ID NO: 1048, b. CDR-L2, comprising the amino acid sequence SEQ ID NO: 1590, and c. CDR-L3, comprising the amino acid sequence SEQ ID NO: 2132.

[2716] In one aspect, an antibody or antigen-binding fragment thereof is provided, wherein the antibody or antigen-binding fragment thereof comprises a VH as in any of the embodiments provided above, and a VL as in any of the embodiments provided above. In some embodiments, the antibody or antigen-binding fragment thereof comprises the VH amino acid sequence of SEQ ID NO: 235, and the VL amino acid sequence of SEQ ID NO: 506, optionally including post-translational modifications of those sequences.

### TSTO1006

[2717] In one aspect, the present disclosure provides an antibody or antigen-binding fragment thereof comprising at least one or both variable regions selected from: a. VH comprising the amino acid sequence of SEQ ID NO: 236 and b. VL comprising the amino acid sequence of SEQ ID NO: 507.

[2718] In one aspect, the present disclosure provides an antibody or antigen-binding fragment thereof comprising at least one, two, three, four, five, or six CDRs selected from: a. CDR-H1 comprising the amino acid sequence of SEQ ID NO: 778, b. CDR-H2 comprising the amino acid sequence of SEQ ID NO: 1320, c. CDR-H3 comprising the amino acid sequence of SEQ ID NO: 1862, d. CDR-L1 comprising the amino acid sequence of SEQ ID NO: 1049, e. CDR-L2 comprising the amino acid sequence of SEQ ID NO: 1591, and f. CDR-L3 comprising the amino acid sequence of SEQ ID NO: 2133.

[2719] In one aspect, the present disclosure provides an antibody or antigen-binding fragment thereof comprising a CDR-H3 comprising the amino acid sequence of SEQ ID NO: 1862, and a CDR-L3 comprising the amino acid sequence of SEQ ID NO: 2133.

[2720] In one aspect, the present disclosure provides an antibody or antigen-binding fragment thereof comprising at least one, at least two, or all three VH CDR sequences selected from: a. CDR-H1 comprising the amino acid sequence of SEQ ID NO: 778, b. CDR-H2 comprising the amino acid sequence of SEQ ID NO: 1320, c. CDR-H3 comprising the amino acid sequence of SEQ ID NO: 1862, and a VL comprising the amino acid sequence of SEQ ID NO: 507.

[2721] In one aspect, the present disclosure provides an antibody or antigen-binding fragment thereof comprising at least one, at least two, or all three VL CDR sequences selected from: a. CDR-L1 comprising the amino acid sequence of SEQ ID NO: 1049, b. CDR-L2 comprising the amino acid sequence of SEQ ID NO: 1591, c. CDR-L3 comprising the amino acid sequence of SEQ ID NO: 2133, and a VH comprising the amino acid sequence of SEQ ID NO: 236.

[2722] In one aspect, an antibody or antigen-binding fragment thereof is provided, wherein the antibody or antigen-binding fragment thereof comprises a heavy chain variable domain (VH) having at least 90%, 91%, 92%, 93%, 94%, 95%, 96%, 97%, 98%, 99%, or 100% sequence identity to the amino acid sequence SEQ ID NO: 236. In some embodiments, a VH sequence having at least 90%, 91%, 92%, 93%, 94%, 95%, 96%, 97%, 98%, or 99% identity contains substitutions (e.g., conservative substitutions), insertions, or deletions relative to the reference sequence, but an antibody or antigen-binding fragment thereof comprising that sequence retains the ability to bind to same antigen as of the parent (e.g., cancer associated antigen). In some embodiments, a total of 1 to 10 amino acids have been substituted, inserted and/or deleted in the amino acid sequence SEQ ID NO: 236. In some embodiments, substitutions, insertions, or deletions occur in regions outside the CDRs (e.g., in the FRs). Optionally, the antibody or antigen-binding fragment thereof comprises the VH sequence SEQ ID NO: 236, including one or more post-translational modifications of that sequence. In a particular embodiment, the VH comprises one, two or three CDRs selected from: a. CDR-H1, comprising the amino acid sequence SEQ ID NO: 778, b. CDR-H2, comprising the amino acid sequence SEQ ID NO: 1320, and c. CDR-H3, comprising the amino acid sequence SEQ ID NO: 1862.

[2723] In one aspect, an antibody or antigen-binding fragment thereof is provided, wherein the antibody or antigen-binding fragment thereof comprises a light chain variable domain (VL) having at least 90%, 91%, 92%, 93%, 94%, 95%, 96%, 97%, 98%, 99%, or 100% sequence identity to the amino acid sequence SEQ ID NO: 507. In some embodiments, a VL sequence having at least 90%, 91%, 92%, 93%, 94%, 95%, 96%, 97%, 98%, or 99% identity contains substitutions (e.g., conservative substitutions), insertions, or deletions relative to the reference sequence, but an antibody or antigen-binding fragment thereof comprising that sequence retains the ability to bind to same antigen as the parent (e.g., cancer associated antigen). In some embodiments, a total of 1 to 10 amino acids have been substituted, inserted and/or deleted in the amino acid sequence SEQ ID NO: 507. In some embodiments, the substitutions, insertions, or deletions occur in regions outside the CDRs (e.g., in the FRs). Optionally, the antibody or antigen-binding fragment thereof comprises the VL sequence SEQ ID NO: 507, including one or more post-translational modifications of that sequence. In a particular embodiment, the VL comprises one, two or three CDRs selected from: a. CDR-L1, comprising the amino acid sequence SEQ ID NO: 1049, b. CDR-L2, comprising the amino acid sequence SEQ ID NO: 1591, and c. CDR-L3, comprising the amino acid sequence SEQ ID NO: 2133.

[2724] In one aspect, an antibody or antigen-binding fragment thereof is provided, wherein the antibody or antigen-binding fragment thereof comprises a VH as in any of the embodiments provided above, and a VL as in any of the embodiments provided above. In some embodiments, the antibody or antigen-binding fragment thereof comprises the VH amino acid sequence of SEQ ID NO: 236, and the VL amino acid sequence of SEQ ID NO: 507, optionally including post-translational modifications of those sequences.

### TSTO1007

[2725] In one aspect, the present disclosure provides an antibody or antigen-binding fragment thereof comprising at least one or both variable regions selected from: a. VH comprising the amino acid sequence of SEQ ID NO: 237 and b. VL comprising the amino acid sequence of SEQ ID NO: 508.

[2726] In one aspect, the present disclosure provides an antibody or antigen-binding fragment thereof comprising at least one, two, three, four, five, or six CDRs selected from: a. CDR-H1 comprising the amino acid sequence of SEQ ID NO: 779, b. CDR-H2 comprising the amino acid sequence of SEQ ID NO: 1321, c. CDR-H3 comprising the amino acid sequence of SEQ ID NO: 1863, d. CDR-L1 comprising the amino acid sequence of SEQ ID NO: 1050, e. CDR-L2 comprising the amino acid sequence of SEQ ID NO: 1592, and f. CDR-L3 comprising the amino acid sequence of SEQ ID NO: 2134.

[2727] In one aspect, the present disclosure provides an antibody or antigen-binding fragment thereof comprising a CDR-H3 comprising the amino acid sequence of SEQ ID NO: 1863, and a CDR-L3 comprising the amino acid sequence of SEQ ID NO: 2134.

[2728] In one aspect, the present disclosure provides an antibody or antigen-binding fragment thereof comprising at least one, at least two, or all three VH CDR sequences selected from: a. CDR-H1 comprising the amino acid sequence of SEQ ID NO: 779, b. CDR-H2 comprising the amino acid sequence of SEQ ID NO: 1321, c. CDR-H3 comprising the amino acid sequence of SEQ ID NO: 1863, and a VL comprising the amino acid sequence of SEQ ID NO: 508.

[2729] In one aspect, the present disclosure provides an antibody or antigen-binding fragment thereof comprising at least one, at least two, or all three VL CDR sequences selected from: a. CDR-L1 comprising the amino acid sequence of SEQ ID NO: 1050, b. CDR-L2 comprising the amino acid sequence of SEQ ID NO: 1592, c. CDR-L3 comprising the amino acid sequence of SEQ ID NO: 2134, and a VH comprising the amino acid sequence of SEQ ID NO: 237.

[2730] In one aspect, an antibody or antigen-binding fragment thereof is provided, wherein the antibody or antigen-binding fragment thereof comprises a heavy chain variable domain (VH) having at least 90%, 91%, 92%, 93%, 94%, 95%, 96%, 97%, 98%, 99%, or 100% sequence identity to the amino acid sequence SEQ ID NO: 237. In some embodiments, a VH sequence having at least 90%, 91%, 92%, 93%, 94%, 95%, 96%, 97%, 98%, or 99% identity contains substitutions (e.g., conservative substitutions), insertions, or deletions relative to the reference sequence, but an antibody or antigen-binding fragment thereof comprising that sequence retains the ability to bind to same antigen as of the parent (e.g., cancer associated antigen). In some embodiments, a total of 1 to 10 amino acids have been substituted, inserted and/or deleted in the amino acid sequence SEQ ID NO: 237. In some embodiments, substitutions, insertions, or deletions occur in regions outside the CDRs (e.g., in the FRs). Optionally, the antibody or antigen-binding fragment thereof comprises the VH sequence SEQ ID NO: 237, including one or more post-translational modifications of that sequence. In a particular embodiment, the VH comprises one, two or three CDRs selected from: a. CDR-H1, comprising the amino acid sequence SEQ ID NO: 779, b. CDR-H2, comprising the amino acid sequence SEQ ID NO: 1321, and c. CDR-H3, comprising the amino acid sequence SEQ ID NO: 1863.

[2731] In one aspect, an antibody or antigen-binding fragment thereof is provided, wherein the antibody or antigen-binding fragment thereof comprises a light chain variable domain (VL) having at least 90%, 91%, 92%, 93%, 94%, 95%, 96%, 97%, 98%, 99%, or 100% sequence identity to the amino acid sequence SEQ ID NO: 508. In some embodiments, a VL sequence having at least 90%, 91%, 92%, 93%, 94%, 95%, 96%, 97%, 98%, or 99% identity contains substitutions (e.g., conservative substitutions), insertions, or deletions relative to the reference sequence, but an antibody or antigen-binding fragment thereof comprising that sequence retains the ability to bind to same antigen as the parent (e.g., cancer associated antigen). In some embodiments, a total of 1 to 10 amino acids have been substituted, inserted and/or deleted in the amino acid sequence SEQ ID NO: 508. In some embodiments, the substitutions, insertions, or deletions occur in regions outside the CDRs (e.g., in the FRs). Optionally, the antibody or antigen-binding fragment thereof comprises the VL sequence SEQ ID NO: 508, including one or more post-translational modifications of that sequence. In a particular embodiment, the VL comprises one, two or three CDRs selected from: a. CDR-L1, comprising the amino acid sequence SEQ ID NO: 1050, b. CDR-L2, comprising the amino acid sequence SEQ ID NO: 1592, and c. CDR-L3, comprising the amino acid sequence SEQ ID NO: 2134.

[2732] In one aspect, an antibody or antigen-binding fragment thereof is provided, wherein the antibody or antigen-binding fragment thereof comprises a VH as in any of the embodiments provided above, and a VL as in any of the embodiments provided above. In some embodiments, the antibody or antigen-binding fragment thereof comprises the VH amino acid sequence of SEQ ID NO: 237, and the VL amino acid sequence of SEQ ID NO: 508, optionally including post-translational modifications of those sequences.

### TSTO1008

[2733] In one aspect, the present disclosure provides an antibody or antigen-binding fragment thereof comprising at least one or both variable regions selected from: a. VH comprising the amino acid sequence of SEQ ID NO: 238 and b. VL comprising the amino acid sequence of SEQ ID NO: 509.

[2734] In one aspect, the present disclosure provides an antibody or antigen-binding fragment thereof comprising at least one, two, three, four, five, or six CDRs selected from: a. CDR-H1 comprising the amino acid sequence of SEQ ID NO: 780, b. CDR-H2 comprising the amino acid sequence of SEQ ID NO: 1322, c. CDR-H3 comprising the amino acid sequence of SEQ ID NO: 1864, d. CDR-L1 comprising the amino acid sequence of SEQ ID NO: 1051, e. CDR-L2 comprising the amino acid sequence of SEQ ID NO: 1593, and f. CDR-L3 comprising the amino acid sequence of SEQ ID NO: 2135.

[2735] In one aspect, the present disclosure provides an antibody or antigen-binding fragment thereof comprising a CDR-H3 comprising the amino acid sequence of SEQ ID NO: 1864, and a CDR-L3 comprising the amino acid sequence of SEQ ID NO: 2135.

[2736] In one aspect, the present disclosure provides an antibody or antigen-binding fragment thereof comprising at least one, at least two, or all three VH CDR sequences selected from: a. CDR-H1 comprising the amino acid sequence of SEQ ID NO: 780, b. CDR-H2 comprising the amino acid sequence of SEQ ID NO: 1322, c. CDR-H3 comprising the amino acid sequence of SEQ ID NO: 1864, and a VL comprising the amino acid sequence of SEQ ID NO: 509.

[2737] In one aspect, the present disclosure provides an antibody or antigen-binding fragment thereof comprising at least one, at least two, or all three VL CDR sequences selected from: a. CDR-L1 comprising the amino acid sequence of SEQ ID NO: 1051, b. CDR-L2 comprising the amino acid sequence of SEQ ID NO: 1593, c. CDR-L3 comprising the amino acid sequence of SEQ ID NO: 2135, and a VH comprising the amino acid sequence of SEQ ID NO: 238.

[2738] In one aspect, an antibody or antigen-binding fragment thereof is provided, wherein the antibody or antigen-binding fragment thereof comprises a heavy chain variable domain (VH) having at least 90%, 91%, 92%, 93%, 94%, 95%, 96%, 97%, 98%, 99%, or 100% sequence identity to the amino acid sequence SEQ ID NO: 238. In some embodiments, a VH sequence having at least 90%, 91%, 92%, 93%, 94%, 95%, 96%, 97%, 98%, or 99% identity contains substitutions (e.g., conservative substitutions), insertions, or deletions relative to the reference sequence, but an antibody or antigen-binding fragment thereof comprising that sequence retains the ability to bind to same antigen as of the parent (e.g., cancer associated antigen). In some embodiments, a total of 1 to 10 amino acids have been substituted, inserted and/or deleted in the amino acid sequence SEQ ID NO: 238. In some embodiments, substitutions, insertions, or deletions occur in regions outside the CDRs (e.g., in the FRs). Optionally, the antibody or antigen-binding fragment thereof comprises the VH sequence SEQ ID NO: 238, including one or more post-translational modifications of that sequence. In a particular embodiment, the VH comprises one, two or three CDRs selected from: a. CDR-H1, comprising the amino acid sequence SEQ ID NO: 780, b. CDR-H2, comprising the amino acid sequence SEQ ID NO: 1322, and c. CDR-H3, comprising the amino acid sequence SEQ ID NO: 1864.

[2739] In one aspect, an antibody or antigen-binding fragment thereof is provided, wherein the antibody or antigen-binding fragment thereof comprises a light chain variable domain (VL) having at least 90%, 91%, 92%, 93%, 94%, 95%, 96%, 97%, 98%, 99%, or 100% sequence identity to the amino acid sequence SEQ ID NO: 509. In some embodiments, a VL sequence having at least 90%, 91%, 92%, 93%, 94%, 95%, 96%, 97%, 98%, or 99% identity contains substitutions (e.g., conservative substitutions), insertions, or deletions relative to the reference sequence, but an antibody or antigen-binding fragment thereof comprising that sequence retains the ability to bind to same antigen as the parent (e.g., cancer associated antigen). In some embodiments, a total of 1 to 10 amino acids have been substituted, inserted and/or deleted in the amino acid sequence SEQ ID NO: 509. In some embodiments, the substitutions, insertions, or deletions occur in regions outside the CDRs (e.g., in the FRs). Optionally, the antibody or antigen-binding fragment thereof comprises the VL sequence SEQ ID NO: 509, including one or more post-translational modifications of that sequence. In a particular embodiment, the VL comprises one, two or three CDRs selected from: a. CDR-L1, comprising the amino acid sequence SEQ ID NO: 1051, b. CDR-L2, comprising the amino acid sequence SEQ ID NO: 1593, and c. CDR-L3, comprising the amino acid sequence SEQ ID NO: 2135.

[2740] In one aspect, an antibody or antigen-binding fragment thereof is provided, wherein the antibody or antigen-binding fragment thereof comprises a VH as in any of the embodiments provided above, and a VL as in any of the embodiments provided above. In some embodiments, the antibody or antigen-binding fragment thereof comprises the VH amino acid sequence of SEQ ID NO: 238, and the VL amino acid sequence of SEQ ID NO: 509, optionally including post-translational modifications of those sequences.

### TSTO1009

[2741] In one aspect, the present disclosure provides an antibody or antigen-binding fragment thereof comprising at least one or both variable regions selected from: a. VH comprising the amino acid sequence of SEQ ID NO: 239 and b. VL comprising the amino acid sequence of SEQ ID NO: 510.

[2742] In one aspect, the present disclosure provides an antibody or antigen-binding fragment thereof comprising at least one, two, three, four, five, or six CDRs selected from: a. CDR-H1 comprising the amino acid sequence of SEQ ID NO: 781, b. CDR-H2 comprising the amino acid sequence of SEQ ID NO: 1323, c. CDR-H3 comprising the amino acid sequence of SEQ ID NO: 1865, d. CDR-L1 comprising the amino acid sequence of SEQ ID NO: 1052, e. CDR-L2 comprising the amino acid sequence of SEQ ID NO: 1594, and f. CDR-L3 comprising the amino acid sequence of SEQ ID NO: 2136.

[2743] In one aspect, the present disclosure provides an antibody or antigen-binding fragment thereof comprising a CDR-H3 comprising the amino acid sequence of SEQ ID NO: 1865, and a CDR-L3 comprising the amino acid sequence of SEQ ID NO: 2136.

[2744] In one aspect, the present disclosure provides an antibody or antigen-binding fragment thereof comprising at least one, at least two, or all three VH CDR sequences selected from: a. CDR-H1 comprising the amino acid sequence of SEQ ID NO: 781, b. CDR-H2 comprising the amino acid sequence of SEQ ID NO: 1323, c. CDR-H3 comprising the amino acid sequence of SEQ ID NO: 1865, and a VL comprising the amino acid sequence of SEQ ID NO: 510.

[2745] In one aspect, the present disclosure provides an antibody or antigen-binding fragment thereof comprising at least one, at least two, or all three VL CDR sequences selected from: a. CDR-L1 comprising the amino acid sequence of SEQ ID NO: 1052, b. CDR-L2 comprising the amino acid sequence of SEQ ID NO: 1594, c. CDR-L3 comprising the amino acid sequence of SEQ ID NO: 2136, and a VH comprising the amino acid sequence of SEQ ID NO: 239.

[2746] In one aspect, an antibody or antigen-binding fragment thereof is provided, wherein the antibody or antigen-binding fragment thereof comprises a heavy chain variable domain (VH) having at least 90%, 91%, 92%, 93%, 94%, 95%, 96%, 97%, 98%, 99%, or 100% sequence identity to the amino acid sequence SEQ ID NO: 239. In some embodiments, a VH sequence having at least 90%, 91%, 92%, 93%, 94%, 95%, 96%, 97%, 98%, or 99% identity contains substitutions (e.g., conservative substitutions), insertions, or deletions relative to the reference sequence, but an antibody or antigen-binding fragment thereof comprising that sequence retains the ability to bind to same antigen as of the parent (e.g., cancer associated antigen). In some embodiments, a total of 1 to 10 amino acids have been substituted, inserted and/or deleted in the amino acid sequence SEQ ID NO: 239. In some embodiments, substitutions, antigen-binding fragment thereof comprises the VH sequence SEQ ID NO: 239, including one or more post-translational modifications of that sequence. In a particular embodiment, the VH comprises one, two or three CDRs selected from: a. CDR-H1, comprising the amino acid sequence SEQ ID NO: 781, b. CDR-H2, comprising the amino acid sequence SEQ ID NO: 1323, and c. CDR-H3, comprising the amino acid sequence SEQ ID NO: 1865.

[2747] In one aspect, an antibody or antigen-binding fragment thereof is provided, wherein the antibody or antigen-binding fragment thereof comprises a light chain variable domain (VL) having at least 90%, 91%, 92%, 93%, 94%, 95%, 96%, 97%, 98%, 99%, or 100% sequence identity to the amino acid sequence SEQ ID NO: 510. In some embodiments, a VL sequence having at least 90%, 91%, 92%, 93%, 94%, 95%, 96%, 97%, 98%, or 99% identity contains substitutions (e.g., conservative substitutions), insertions, or deletions relative to the reference sequence, but an antibody or antigen-binding fragment thereof comprising that sequence retains the ability to bind to same antigen as the parent (e.g., cancer associated antigen). In some embodiments, a total of 1 to 10 amino acids have been substituted, inserted and/or deleted in the amino acid sequence SEQ ID NO: 510. In some embodiments, the substitutions, insertions, or deletions occur in regions outside the CDRs (e.g., in the FRs). Optionally, the antibody or antigen-binding fragment thereof comprises the VL sequence SEQ ID NO: 510, including one or more post-translational modifications of that sequence. In a particular embodiment, the VL comprises one, two or three CDRs selected from: a. CDR-L1, comprising the amino acid sequence SEQ ID NO: 1052, b. CDR-L2, comprising the amino acid sequence SEQ ID NO: 1594, and c. CDR-L3, comprising the amino acid sequence SEQ ID NO: 2136.

[2748] In one aspect, an antibody or antigen-binding fragment thereof is provided, wherein the antibody or antigen-binding fragment thereof comprises a VH as in any of the embodiments provided above, and a VL as in any of the embodiments provided above. In some embodiments, the antibody or antigen-binding fragment thereof comprises the VH amino acid sequence of SEQ ID NO: 239, and the VL amino acid sequence of SEQ ID NO: 510, optionally including post-translational modifications of those sequences.

### TSTO1010

[2749] In one aspect, the present disclosure provides an antibody or antigen-binding fragment thereof comprising at least one or both variable regions selected from: a. VH comprising the amino acid sequence of SEQ ID NO: 240 and b. VL comprising the amino acid sequence of SEQ ID NO: 511.

[2750] In one aspect, the present disclosure provides an antibody or antigen-binding fragment thereof comprising at least one, two, three, four, five, or six CDRs selected from: a. CDR-H1 comprising the amino acid sequence of SEQ ID NO: 782, b. CDR-H2 comprising the amino acid sequence of SEQ ID NO: 1324, c. CDR-H3 comprising the amino acid sequence of SEQ ID NO: 1866, d. CDR-L1 comprising the amino acid sequence of SEQ ID NO: 1053, e. CDR-L2 comprising the amino acid sequence of SEQ ID NO: 1595, and f. CDR-L3 comprising the amino acid sequence of SEQ ID NO: 2137.

[2751] In one aspect, the present disclosure provides an antibody or antigen-binding fragment thereof comprising a CDR-H3 comprising the amino acid sequence of SEQ ID NO: 1866, and a CDR-L3 comprising the amino acid sequence of SEQ ID NO: 2137.

[2752] In one aspect, the present disclosure provides an antibody or antigen-binding fragment thereof comprising at least one, at least two, or all three VH CDR sequences selected from: a. CDR-H1 comprising the amino acid sequence of SEQ ID NO: 782, b. CDR-H2 comprising the amino acid sequence of SEQ ID NO: 1324, c. CDR-H3 comprising the amino acid sequence of SEQ ID NO: 1866, and a VL comprising the amino acid sequence of SEQ ID NO: 511.

[2753] In one aspect, the present disclosure provides an antibody or antigen-binding fragment thereof comprising at least one, at least two, or all three VL CDR sequences selected from: a. CDR-L1 comprising the amino acid sequence of SEQ ID NO: 1053, b. CDR-L2 comprising the amino acid sequence of SEQ ID NO: 1595, c. CDR-L3 comprising the amino acid sequence of SEQ ID NO: 2137, and a VH comprising the amino acid sequence of SEQ ID NO: 240.

[2754] In one aspect, an antibody or antigen-binding fragment thereof is provided, wherein the antibody or antigen-binding fragment thereof comprises a heavy chain variable domain (VH) having at least 90%, 91%, 92%, 93%, 94%, 95%, 96%, 97%, 98%, 99%, or 100% sequence identity to the amino acid sequence SEQ ID NO: 240. In some embodiments, a VH sequence having at least 90%, 91%, 92%, 93%, 94%, 95%, 96%, 97%, 98%, or 99% identity contains substitutions (e.g., conservative substitutions), insertions, or deletions relative to the reference sequence, but an antibody or antigen-binding fragment thereof comprising that sequence retains the ability to bind to same antigen as of the parent (e.g., cancer associated antigen). In some embodiments, a total of 1 to 10 amino acids have been substituted, inserted and/or deleted in the amino acid sequence SEQ ID NO: 240. In some embodiments, substitutions, insertions, or deletions occur in regions outside the CDRs (e.g., in the FRs). Optionally, the antibody or antigen-binding fragment thereof comprises the VH sequence SEQ ID NO: 240, including one or more post-translational modifications of that sequence. In a particular embodiment, the VH comprises one, two or three CDRs selected from: a. CDR-H1, comprising the amino acid sequence SEQ ID NO: 782, b. CDR-H2, comprising the amino acid sequence SEQ ID NO: 1324, and c. CDR-H3, comprising the amino acid sequence SEQ ID NO: 1866.

[2755] In one aspect, an antibody or antigen-binding fragment thereof is provided, wherein the antibody or antigen-binding fragment thereof comprises a light chain variable domain (VL) having at least 90%, 91%, 92%, 93%, 94%, 95%, 96%, 97%, 98%, 99%, or 100% sequence identity to the amino acid sequence SEQ ID NO: 511. In some embodiments, a VL sequence having at least 90%, 91%, 92%, 93%, 94%, 95%, 96%, 97%, 98%, or 99% identity contains substitutions (e.g., conservative substitutions), insertions, or deletions relative to the reference sequence, but an antibody or antigen-binding fragment thereof comprising that sequence retains the ability to bind to same antigen as the parent (e.g., cancer associated antigen). In some embodiments, a total of 1 to 10 amino acids have been substituted, inserted and/or deleted in the amino acid sequence SEQ ID NO: 511. In some embodiments, the substitutions, insertions, or deletions occur in regions outside the CDRs (e.g., in the FRs). Optionally, the antibody or antigen-binding fragment thereof comprises the VL sequence SEQ ID NO: 511, including one or more post-translational modifications of that sequence. In a particular embodiment, the VL comprises one, two or three CDRs selected from: a. CDR-L1, comprising the amino acid sequence SEQ ID NO: 1053, b. CDR-L2, comprising the amino acid sequence SEQ ID NO: 1595, and c. CDR-L3, comprising the amino acid sequence SEQ ID NO: 2137.

[2756] In one aspect, an antibody or antigen-binding fragment thereof is provided, wherein the antibody or antigen-binding fragment thereof comprises a VH as in any of the embodiments provided above, and a VL as in any of the embodiments provided above. In some embodiments, the antibody or antigen-binding fragment thereof comprises the VH amino acid sequence of SEQ ID NO: 240, and the VL amino acid sequence of SEQ ID NO: 511, optionally including post-translational modifications of those sequences.

### TTES1001

[2757] In one aspect, the present disclosure provides an antibody or antigen-binding fragment thereof comprising at least one or both variable regions selected from: a. VH comprising the amino acid sequence of SEQ ID NO: 241 and b. VL comprising the amino acid sequence of SEQ ID NO: 512.

[2758] In one aspect, the present disclosure provides an antibody or antigen-binding fragment thereof comprising at least one, two, three, four, five, or six CDRs selected from: a. CDR-H1 comprising the amino acid sequence of SEQ ID NO: 783, b. CDR-H2 comprising the amino acid sequence of SEQ ID NO: 1325, c. CDR-H3 comprising the amino acid sequence of SEQ ID NO: 1867, d. CDR-L1 comprising the amino acid sequence of SEQ ID NO: 1054, e. CDR-L2 comprising the amino acid sequence of SEQ ID NO: 1596, and f. CDR-L3 comprising the amino acid sequence of SEQ ID NO: 2138.

[2759] In one aspect, the present disclosure provides an antibody or antigen-binding fragment thereof comprising a CDR-H3 comprising the amino acid sequence of SEQ ID NO: 1867, and a CDR-L3 comprising the amino acid sequence of SEQ ID NO: 2138.

[2760] In one aspect, the present disclosure provides an antibody or antigen-binding fragment thereof comprising at least one, at least two, or all three VH CDR sequences selected from: a. CDR-H1 comprising the amino acid sequence of SEQ ID NO: 783, b. CDR-H2 comprising the amino acid sequence of SEQ ID NO: 1325, c. CDR-H3 comprising the amino acid sequence of SEQ ID NO: 1867, and a VL comprising the amino acid sequence of SEQ ID NO: 512.

[2761] In one aspect, the present disclosure provides an antibody or antigen-binding fragment thereof comprising at least one, at least two, or all three VL CDR sequences selected from: a. CDR-L1 comprising the amino acid sequence of SEQ ID NO: 1054, b. CDR-L2 comprising the amino acid sequence of SEQ ID NO: 1596, c. CDR-L3 comprising the amino acid sequence of SEQ ID NO: 2138, and a VH comprising the amino acid sequence of SEQ ID NO: 241.

[2762] In one aspect, an antibody or antigen-binding fragment thereof is provided, wherein the antibody or antigen-binding fragment thereof comprises a heavy chain variable domain (VH) having at least 90%, 91%, 92%, 93%, 94%, 95%, 96%, 97%, 98%, 99%, or 100% sequence identity to the amino acid sequence SEQ ID NO: 241. In some embodiments, a VH sequence having at least 90%, 91%, 92%, 93%, 94%, 95%, 96%, 97%, 98%, or 99% identity contains substitutions (e.g., conservative substitutions), insertions, or deletions relative to the reference sequence, but an antibody or antigen-binding fragment thereof comprising that sequence retains the ability to bind to same antigen as of the parent (e.g., cancer associated antigen). In some embodiments, a total of 1 to 10 amino acids have been substituted, inserted and/or deleted in the amino acid sequence SEQ ID NO: 241. In some embodiments, substitutions, insertions, or deletions occur in regions outside the CDRs (e.g., in the FRs). Optionally, the antibody or antigen-binding fragment thereof comprises the VH sequence SEQ ID NO: 241, including one or more post-translational modifications of that sequence. In a particular embodiment, the VH comprises one, two or three CDRs selected from: a. CDR-H1, comprising the amino acid sequence SEQ ID NO: 783, b. CDR-H2, comprising the amino acid sequence SEQ ID NO: 1325, and c. CDR-H3, comprising the amino acid sequence SEQ ID NO: 1867.

[2763] In one aspect, an antibody or antigen-binding fragment thereof is provided, wherein the antibody or antigen-binding fragment thereof comprises a light chain variable domain (VL) having at least 90%, 91%, 92%, 93%, 94%, 95%, 96%, 97%, 98%, 99%, or 100% sequence identity to the amino acid sequence SEQ ID NO: 512. In some embodiments, a VL sequence having at least 90%, 91%, 92%, 93%, 94%, 95%, 96%, 97%, 98%, or 99% identity contains substitutions (e.g., conservative substitutions), insertions, or deletions relative to the reference sequence, but an antibody or antigen-binding fragment thereof comprising that sequence retains the ability to bind to same antigen as the parent (e.g., cancer associated antigen). In some embodiments, a total of 1 to 10 amino acids have been substituted, inserted and/or deleted in the amino acid sequence SEQ ID NO: 512. In some embodiments, the substitutions, insertions, or deletions occur in regions outside the CDRs (e.g., in the FRs). Optionally, the antibody or antigen-binding fragment thereof comprises the VL sequence SEQ ID NO: 512, including one or more post-translational modifications of that sequence. In a particular embodiment, the VL comprises one, two or three CDRs selected from: a. CDR-L1, comprising the amino acid sequence SEQ ID NO: 1054, b. CDR-L2, comprising the amino acid sequence SEQ ID NO: 1596, and c. CDR-L3, comprising the amino acid sequence SEQ ID NO: 2138.

[2764] In one aspect, an antibody or antigen-binding fragment thereof is provided, wherein the antibody or antigen-binding fragment thereof comprises a VH as in any of the embodiments provided above, and a VL as in any of the embodiments provided above. In some embodiments, the antibody or antigen-binding fragment thereof comprises the VH amino acid sequence of SEQ ID NO: 241, and the VL amino acid sequence of SEQ ID NO: 512, optionally including post-translational modifications of those sequences.

### TTES1002

[2765] In one aspect, the present disclosure provides an antibody or antigen-binding fragment thereof comprising at least one or both variable regions selected from: a. VH comprising the amino acid sequence of SEQ ID NO: 242 and b. VL comprising the amino acid sequence of SEQ ID NO: 513.

[2766] In one aspect, the present disclosure provides an antibody or antigen-binding fragment thereof comprising at least one, two, three, four, five, or six CDRs selected from: a. CDR-H1 comprising the amino acid sequence of SEQ ID NO: 784, b. CDR-H2 comprising the amino acid sequence of SEQ ID NO: 1326, c. CDR-H3 comprising the amino acid sequence of SEQ ID NO: 1868, d. CDR-L1 comprising the amino acid sequence of SEQ ID NO: 1055, e. CDR-L2 comprising the amino acid sequence of SEQ ID NO: 1597, and f. CDR-L3 comprising the amino acid sequence of SEQ ID NO: 2139.

[2767] In one aspect, the present disclosure provides an antibody or antigen-binding fragment thereof comprising a CDR-H3 comprising the amino acid sequence of SEQ ID NO: 1868, and a CDR-L3 comprising the amino acid sequence of SEQ ID NO: 2139.

[2768] In one aspect, the present disclosure provides an antibody or antigen-binding fragment thereof comprising at least one, at least two, or all three VH CDR sequences selected from: a. CDR-H1 comprising the amino acid sequence of SEQ ID NO: 784, b. CDR-H2 comprising the amino acid sequence of SEQ ID NO: 1326, c. CDR-H3 comprising the amino acid sequence of SEQ ID NO: 1868, and a. VL comprising the amino acid sequence of SEQ ID NO: 513.

[2769] In one aspect, the present disclosure provides an antibody or antigen-binding fragment thereof comprising at least one, at least two, or all three VL CDR sequences selected from: a. CDR-L1 comprising the amino acid sequence of SEQ ID NO: 1055, b. CDR-L2 comprising the amino acid sequence of SEQ ID NO: 1597, c. CDR-L3 comprising the amino acid sequence of SEQ ID NO: 2139, and a. VH comprising the amino acid sequence of SEQ ID NO: 242.

[2770] In one aspect, an antibody or antigen-binding fragment thereof is provided, wherein the antibody or antigen-binding fragment thereof comprises a heavy chain variable domain (VH) having at least 90%, 91%, 92%, 93%, 94%, 95%, 96%, 97%, 98%, 99%, or 100% sequence identity to the amino acid sequence SEQ ID NO: 242. In some embodiments, a VH sequence having at least 90%, 91%, 92%, 93%, 94%, 95%, 96%, 97%, 98%, or 99% identity contains substitutions (e.g., conservative substitutions), insertions, or deletions relative to the reference sequence, but an antibody or antigen-binding fragment thereof comprising that sequence retains the ability to bind to same antigen as of the parent (e.g., cancer associated antigen). In some embodiments, a total of 1 to 10 amino acids have been substituted, inserted and/or deleted in the amino acid sequence SEQ ID NO: 242. In some embodiments, substitutions, insertions, or deletions occur in regions outside the CDRs (e.g., in the FRs). Optionally, the antibody or antigen-binding fragment thereof comprises the VH sequence SEQ ID NO: 242, including one or more post-translational modifications of that sequence. In a particular embodiment, the VH comprises one, two or three CDRs selected from: a. CDR-H1, comprising the amino acid sequence SEQ ID NO: 784, b. CDR-H2, comprising the amino acid sequence SEQ ID NO: 1326, and c. CDR-H3, comprising the amino acid sequence SEQ ID NO: 1868.

[2771] In one aspect, an antibody or antigen-binding fragment thereof is provided, wherein the antibody or antigen-binding fragment thereof comprises a light chain variable domain (VL) having at least 90%, 91%, 92%, 93%, 94%, 95%, 96%, 97%, 98%, 99%, or 100% sequence identity to the amino acid sequence SEQ ID NO: 513. In some embodiments, a VL sequence having at least 90%, 91%, 92%, 93%, 94%, 95%, 96%, 97%, 98%, or 99% identity contains substitutions (e.g., conservative substitutions), insertions, or deletions relative to the reference sequence, but an antibody or antigen-binding fragment thereof comprising that sequence retains the ability to bind to same antigen as the parent (e.g., cancer associated antigen). In some embodiments, a total of 1 to 10 amino acids have been substituted, inserted and/or deleted in the amino acid sequence SEQ ID NO: 513. In some embodiments, the substitutions, insertions, or deletions occur in regions outside the CDRs (e.g., in the FRs). Optionally, the antibody or antigen-binding fragment thereof comprises the VL sequence SEQ ID NO: 513, including one or more post-translational modifications of that sequence. In a particular embodiment, the VL comprises one, two or three CDRs selected from: a. CDR-L1, comprising the amino acid sequence SEQ ID NO: 1055, b. CDR-L2, comprising the amino acid sequence SEQ ID NO: 1597, and c. CDR-L3, comprising the amino acid sequence SEQ ID NO: 2139.

[2772] In one aspect, an antibody or antigen-binding fragment thereof is provided, wherein the antibody or antigen-binding fragment thereof comprises a VH as in any of the embodiments provided above, and a VL as in any of the embodiments provided above. In some embodiments, the antibody or antigen-binding fragment thereof comprises the VH amino acid sequence of SEQ ID NO: 242, and the VL amino acid sequence of SEQ ID NO: 513, optionally including post-translational modifications of those sequences.

### TTES1003

[2773] In one aspect, the present disclosure provides an antibody or antigen-binding fragment thereof comprising at least one or both variable regions selected from: a. VH comprising the amino acid sequence of SEQ ID NO: 243 and b. VL comprising the amino acid sequence of SEQ ID NO: 514.

[2774] In one aspect, the present disclosure provides an antibody or antigen-binding fragment thereof comprising at least one, two, three, four, five, or six CDRs selected from: a. CDR-H1 comprising the amino acid sequence of SEQ ID NO: 785, b. CDR-H2 comprising the amino acid sequence of SEQ ID NO: 1327, c. CDR-H3 comprising the amino acid sequence of SEQ ID NO: 1869, d. CDR-L1 comprising the amino acid sequence of SEQ ID NO: 1056, e. CDR-L2 comprising the amino acid sequence of SEQ ID NO: 1598, and f. CDR-L3 comprising the amino acid sequence of SEQ ID NO: 2140.

[2775] In one aspect, the present disclosure provides an antibody or antigen-binding fragment thereof comprising a CDR-H3 comprising the amino acid sequence of SEQ ID NO: 1869, and a CDR-L3 comprising the amino acid sequence of SEQ ID NO: 2140.

[2776] In one aspect, the present disclosure provides an antibody or antigen-binding fragment thereof comprising at least one, at least two, or all three VH CDR sequences selected from: a. CDR-H1 comprising the amino acid sequence of SEQ ID NO: 785, b. CDR-H2 comprising the amino acid sequence of SEQ ID NO: 1327, c. CDR-H3 comprising the amino acid sequence of SEQ ID NO: 1869, and a VL comprising the amino acid sequence of SEQ ID NO: 514.

[2777] In one aspect, the present disclosure provides an antibody or antigen-binding fragment thereof comprising at least one, at least two, or all three VL CDR sequences selected from: a. CDR-L1 comprising the amino acid sequence of SEQ ID NO: 1056, b. CDR-L2 comprising the amino acid sequence of SEQ ID NO: 1598, c. CDR-L3 comprising the amino acid sequence of SEQ ID NO: 2140, and a VH comprising the amino acid sequence of SEQ ID NO: 243.

[2778] In one aspect, an antibody or antigen-binding fragment thereof is provided, wherein the antibody or antigen-binding fragment thereof comprises a heavy chain variable domain (VH) having at least 90%, 91%, 92%, 93%, 94%, 95%, 96%, 97%, 98%, 99%, or 100% sequence identity to the amino acid sequence SEQ ID NO: 243. In some embodiments, a VH sequence having at least 90%, 91%, 92%, 93%, 94%, 95%, 96%, 97%, 98%, or 99% identity contains substitutions (e.g., conservative substitutions), thereof comprising that sequence retains the ability to bind to same antigen as of the parent (e.g., cancer associated antigen). In some embodiments, a total of 1 to 10 amino acids have been substituted, inserted and/or deleted in the amino acid sequence SEQ ID NO: 243. In some embodiments, substitutions, insertions, or deletions occur in regions outside the CDRs (e.g., in the FRs). Optionally, the antibody or antigen-binding fragment thereof comprises the VH sequence SEQ ID NO: 243, including one or more post-translational modifications of that sequence. In a particular embodiment, the VH comprises one, two or three CDRs selected from: a. CDR-H1, comprising the amino acid sequence SEQ ID NO: 785, b. CDR-H2, comprising the amino acid sequence SEQ ID NO: 1327, and c. CDR-H3, comprising the amino acid sequence SEQ ID NO: 1869.

[2779] In one aspect, an antibody or antigen-binding fragment thereof is provided, wherein the antibody or antigen-binding fragment thereof comprises a light chain variable domain (VL) having at least 90%, 91%, 92%, 93%, 94%, 95%, 96%, 97%, 98%, 99%, or 100% sequence identity to the amino acid sequence SEQ ID NO: 514. In some embodiments, a VL sequence having at least 90%, 91%, 92%, 93%, 94%, 95%, 96%, 97%, 98%, or 99% identity contains substitutions (e.g., conservative substitutions), insertions, or deletions relative to the reference sequence, but an antibody or antigen-binding fragment thereof comprising that sequence retains the ability to bind to same antigen as the parent (e.g., cancer associated antigen). In some embodiments, a total of 1 to 10 amino acids have been substituted, inserted and/or deleted in the amino acid sequence SEQ ID NO: 514. In some embodiments, the substitutions, insertions, or deletions occur in regions outside the CDRs (e.g., in the FRs). Optionally, the antibody or antigen-binding fragment thereof comprises the VL sequence SEQ ID NO: 514, including one or more post-translational modifications of that sequence. In a particular embodiment, the VL comprises one, two or three CDRs selected from: a. CDR-L1, comprising the amino acid sequence SEQ ID NO: 1056, b. CDR-L2, comprising the amino acid sequence SEQ ID NO: 1598, and c. CDR-L3, comprising the amino acid sequence SEQ ID NO: 2140.

[2780] In one aspect, an antibody or antigen-binding fragment thereof is provided, wherein the antibody or antigen-binding fragment thereof comprises a VH as in any of the embodiments provided above, and a VL as in any of the embodiments provided above. In some embodiments, the antibody or antigen-binding fragment thereof comprises the VH amino acid sequence of SEQ ID NO: 243, and the VL amino acid sequence of SEQ ID NO: 514, optionally including post-translational modifications of those sequences.

### TTES1004

[2781] In one aspect, the present disclosure provides an antibody or antigen-binding fragment thereof comprising at least one or both variable regions selected from: a. VH comprising the amino acid sequence of SEQ ID NO: 244 and b. VL comprising the amino acid sequence of SEQ ID NO: 515.

[2782] In one aspect, the present disclosure provides an antibody or antigen-binding fragment thereof comprising at least one, two, three, four, five, or six CDRs selected from: a. CDR-H1 comprising the amino acid sequence of SEQ ID NO: 786, b. CDR-H2 comprising the amino acid sequence of SEQ ID NO: 1328, c. CDR-H3 comprising the amino acid sequence of SEQ ID NO: 1870, d. CDR-L1 comprising the amino acid sequence of SEQ ID NO: 1057, e. CDR-L2 comprising the amino acid sequence of SEQ ID NO: 1599, and f. CDR-L3 comprising the amino acid sequence of SEQ ID NO: 2141.

[2783] In one aspect, the present disclosure provides an antibody or antigen-binding fragment thereof comprising a CDR-H3 comprising the amino acid sequence of SEQ ID NO: 1870, and a CDR-L3 comprising the amino acid sequence of SEQ ID NO: 2141.

[2784] In one aspect, the present disclosure provides an antibody or antigen-binding fragment thereof comprising at least one, at least two, or all three VH CDR sequences selected from: a. CDR-H1 comprising the amino acid sequence of SEQ ID NO: 786, b. CDR-H2 comprising the amino acid sequence of SEQ ID NO: 1328, c. CDR-H3 comprising the amino acid sequence of SEQ ID NO: 1870, and a. VL comprising the amino acid sequence of SEQ ID NO: 515.

[2785] In one aspect, the present disclosure provides an antibody or antigen-binding fragment thereof comprising at least one, at least two, or all three VL CDR sequences selected from: a. CDR-L1 comprising the amino acid sequence of SEQ ID NO: 1057, b. CDR-L2 comprising the amino acid sequence of SEQ ID NO: 1599, c. CDR-L3 comprising the amino acid sequence of SEQ ID NO: 2141, and d. VH comprising the amino acid sequence of SEQ ID NO: 244.

[2786] In one aspect, an antibody or antigen-binding fragment thereof is provided, wherein the antibody or antigen-binding fragment thereof comprises a heavy chain variable domain (VH) having at least 90%, 91%, 92%, 93%, 94%, 95%, 96%, 97%, 98%, 99%, or 100% sequence identity to the amino acid sequence SEQ ID NO: 244. In some embodiments, a VH sequence having at least 90%, 91%, 92%, 93%, 94%, 95%, 96%, 97%, 98%, or 99% identity contains substitutions (e.g., conservative substitutions), insertions, or deletions relative to the reference sequence, but an antibody or antigen-binding fragment thereof comprising that sequence retains the ability to bind to same antigen as of the parent (e.g., cancer associated antigen). In some embodiments, a total of 1 to 10 amino acids have been substituted, inserted and/or deleted in the amino acid sequence SEQ ID NO: 244. In some embodiments, substitutions, insertions, or deletions occur in regions outside the CDRs (e.g., in the FRs). Optionally, the antibody or antigen-binding fragment thereof comprises the VH sequence SEQ ID NO: 244, including one or more post-translational modifications of that sequence. In a particular embodiment, the VH comprises one, two or three CDRs selected from: a. CDR-H1, comprising the amino acid sequence SEQ ID NO: 786, b. CDR-H2, comprising the amino acid sequence SEQ ID NO: 1328, and c. CDR-H3, comprising the amino acid sequence SEQ ID NO: 1870.

[2787] In one aspect, an antibody or antigen-binding fragment thereof is provided, wherein the antibody or antigen-binding fragment thereof comprises a light chain variable domain (VL) having at least 90%, 91%, 92%, 93%, 94%, 95%, 96%, 97%, 98%, 99%, or 100% sequence identity to the amino acid sequence SEQ ID NO: 515. In some embodiments, a VL sequence having at least 90%, 91%, 92%, 93%, 94%, 95%, 96%, 97%, 98%, or 99% identity contains substitutions (e.g., conservative substitutions), insertions, or deletions relative to the reference sequence, but an antibody or antigen-binding fragment thereof comprising that sequence retains the ability to bind to same antigen as the parent (e.g., cancer associated antigen). In some embodiments, a total of 1 to 10 amino acids have been substituted, inserted and/or deleted in the amino acid sequence SEQ ID NO: 515. In some embodiments, the substitutions, insertions, or deletions occur in regions outside the CDRs (e.g., in the FRs). Optionally, the antibody or antigen-binding fragment thereof comprises the VL sequence SEQ ID NO: 515, including one or more post-translational modifications of that sequence. In a particular embodiment, the VL comprises one, two or three CDRs selected from: a. CDR-L1, comprising the amino acid sequence SEQ ID NO: 1057, b. CDR-L2, comprising the amino acid sequence SEQ ID NO: 1599, and c. CDR-L3, comprising the amino acid sequence SEQ ID NO: 2141.

[2788] In one aspect, an antibody or antigen-binding fragment thereof is provided, wherein the antibody or antigen-binding fragment thereof comprises a VH as in any of the embodiments provided above, and a VL as in any of the embodiments provided above. In some embodiments, the antibody or antigen-binding fragment thereof comprises the VH amino acid sequence of SEQ ID NO: 244, and the VL amino acid sequence of SEQ ID NO: 515, optionally including post-translational modifications of those sequences.

### TTES1005

[2789] In one aspect, the present disclosure provides an antibody or antigen-binding fragment thereof comprising at least one or both variable regions selected from: a. VH comprising the amino acid sequence of SEQ ID NO: 245 and b. VL comprising the amino acid sequence of SEQ ID NO: 516.

[2790] In one aspect, the present disclosure provides an antibody or antigen-binding fragment thereof comprising at least one, two, three, four, five, or six CDRs selected from: a. CDR-H1 comprising the amino acid sequence of SEQ ID NO: 787, b. CDR-H2 comprising the amino acid sequence of SEQ ID NO: 1329, c. CDR-H3 comprising the amino acid sequence of SEQ ID NO: 1871, d. CDR-L1 comprising the amino acid sequence of SEQ ID NO: 1058, e. CDR-L2 comprising the amino acid sequence of SEQ ID NO: 1600, and f. CDR-L3 comprising the amino acid sequence of SEQ ID NO: 2142.

[2791] In one aspect, the present disclosure provides an antibody or antigen-binding fragment thereof comprising a CDR-H3 comprising the amino acid sequence of SEQ ID NO: 1871, and a CDR-L3 comprising the amino acid sequence of SEQ ID NO: 2142.

[2792] In one aspect, the present disclosure provides an antibody or antigen-binding fragment thereof comprising at least one, at least two, or all three VH CDR sequences selected from: a. CDR-H1 comprising the amino acid sequence of SEQ ID NO: 787, b. CDR-H2 comprising the amino acid sequence of SEQ ID NO: 1329, c. CDR-H3 comprising the amino acid sequence of SEQ ID NO: 1871, and d. VL comprising the amino acid sequence of SEQ ID NO: 516.

[2793] In one aspect, the present disclosure provides an antibody or antigen-binding fragment thereof comprising at least one, at least two, or all three VL CDR sequences selected from: a. CDR-L1 comprising the amino acid sequence of SEQ ID NO: 1058, b. CDR-L2 comprising the amino acid sequence of SEQ ID NO: 1600, c. CDR-L3 comprising the amino acid sequence of SEQ ID NO: 2142, and a VH comprising the amino acid sequence of SEQ ID NO: 245.

[2794] In one aspect, an antibody or antigen-binding fragment thereof is provided, wherein the antibody or antigen-binding fragment thereof comprises a heavy chain variable domain (VH) having at least 90%, 91%, 92%, 93%, 94%, 95%, 96%, 97%, 98%, 99%, or 100% sequence identity to the amino acid sequence SEQ ID NO: 245. In some embodiments, a VH sequence having at least 90%, 91%, 92%, 93%, 94%, 95%, 96%, 97%, 98%, or 99% identity contains substitutions (e.g., conservative substitutions), insertions, or deletions relative to the reference sequence, but an antibody or antigen-binding fragment thereof comprising that sequence retains the ability to bind to same antigen as of the parent (e.g., cancer associated antigen). In some embodiments, a total of 1 to 10 amino acids have been substituted, inserted and/or deleted in the amino acid sequence SEQ ID NO: 245. In some embodiments, substitutions, insertions, or deletions occur in regions outside the CDRs (e.g., in the FRs). Optionally, the antibody or antigen-binding fragment thereof comprises the VH sequence SEQ ID NO: 245, including one or more post-translational modifications of that sequence. In a particular embodiment, the VH comprises one, two or three CDRs selected from: a. CDR-H1, comprising the amino acid sequence SEQ ID NO: 787, b. CDR-H2, comprising the amino acid sequence SEQ ID NO: 1329, and c. CDR-H3, comprising the amino acid sequence SEQ ID NO: 1871.

[2795] In one aspect, an antibody or antigen-binding fragment thereof is provided, wherein the antibody or antigen-binding fragment thereof comprises a light chain variable domain (VL) having at least 90%, 91%, 92%, 93%, 94%, 95%, 96%, 97%, 98%, 99%, or 100% sequence identity to the amino acid sequence SEQ ID NO: 516. In some embodiments, a VL sequence having at least 90%, 91%, 92%, 93%, 94%, 95%, 96%, 97%, 98%, or 99% identity contains substitutions (e.g., conservative substitutions), insertions, or deletions relative to the reference sequence, but an antibody or antigen-binding fragment thereof comprising that sequence retains the ability to bind to same antigen as the parent (e.g., cancer associated antigen). In some embodiments, a total of 1 to 10 amino acids have been substituted, inserted and/or deleted in the amino acid sequence SEQ ID NO: 516. In some embodiments, the substitutions, insertions, or deletions occur in regions outside the CDRs (e.g., in the FRs). Optionally, the antibody or antigen-binding fragment thereof comprises the VL sequence SEQ ID NO: 516, including one or more post-translational modifications of that sequence. In a particular embodiment, the VL comprises one, two or three CDRs selected from: a. CDR-L1, comprising the amino acid sequence SEQ ID NO: 1058, b. CDR-L2, comprising the amino acid sequence SEQ ID NO: 1600, and c. CDR-L3, comprising the amino acid sequence SEQ ID NO: 2142.

[2796] In one aspect, an antibody or antigen-binding fragment thereof is provided, wherein the antibody or antigen-binding fragment thereof comprises a VH as in any of the embodiments provided above, and a VL as in any of the embodiments provided above. In some embodiments, the antibody or antigen-binding fragment thereof comprises the VH amino acid sequence of SEQ ID NO: 245, and the VL amino acid sequence of SEQ ID NO: 516, optionally including post-translational modifications of those sequences.

### TTES1006

[2797] In one aspect, the present disclosure provides an antibody or antigen-binding fragment thereof comprising at least one or both variable regions selected from: a. VH comprising the amino acid sequence of SEQ ID NO: 246 and b. VL comprising the amino acid sequence of SEQ ID NO: 517.

[2798] In one aspect, the present disclosure provides an antibody or antigen-binding fragment thereof comprising at least one, two, three, four, five, or six CDRs selected from: a. CDR-H1 comprising the amino acid sequence of SEQ ID NO: 788, b. CDR-H2 comprising the amino acid sequence of SEQ ID NO: 1330, c. CDR-H3 comprising the amino acid sequence of SEQ ID NO: 1872, d. CDR-L1 comprising the amino acid sequence of SEQ ID NO: 1059, e. CDR-L2 comprising the amino acid sequence of SEQ ID NO: 1601, and f. CDR-L3 comprising the amino acid sequence of SEQ ID NO: 2143.

[2799] In one aspect, the present disclosure provides an antibody or antigen-binding fragment thereof comprising a CDR-H3 comprising the amino acid sequence of SEQ ID NO: 1872, a CDR-L3 comprising the amino acid sequence of SEQ ID NO: 2143.

[2800] In one aspect, the present disclosure provides an antibody or antigen-binding fragment thereof comprising at least one, at least two, or all three VH CDR sequences selected from: a. CDR-H1 comprising the amino acid sequence of SEQ ID NO: 788, b. CDR-H2 comprising the amino acid sequence of SEQ ID NO: 1330, c. CDR-H3 comprising the amino acid sequence of SEQ ID NO: 1872, and a VL comprising the amino acid sequence of SEQ ID NO: 517.

[2801] In one aspect, the present disclosure provides an antibody or antigen-binding fragment thereof comprising at least one, at least two, or all three VL CDR sequences selected from: a. CDR-L1 comprising the amino acid sequence of SEQ ID NO: 1059, b. CDR-L2 comprising the amino acid sequence of SEQ ID NO: 1601, c. CDR-L3 comprising the amino acid sequence of SEQ ID NO: 2143, and a VH comprising the amino acid sequence of SEQ ID NO: 246.

[2802] In one aspect, an antibody or antigen-binding fragment thereof is provided, wherein the antibody or antigen-binding fragment thereof comprises a heavy chain variable domain (VH) having at least 90%, 91%, 92%, 93%, 94%, 95%, 96%, 97%, 98%, 99%, or 100% sequence identity to the amino acid sequence SEQ ID NO: 246. In some embodiments, a VH sequence having at least 90%, 91%, 92%, 93%, 94%, 95%, 96%, 97%, 98%, or 99% identity contains substitutions (e.g., conservative substitutions), insertions, or deletions relative to the reference sequence, but an antibody or antigen-binding fragment thereof comprising that sequence retains the ability to bind to same antigen as of the parent (e.g., cancer associated antigen). In some embodiments, a total of 1 to 10 amino acids have been substituted, inserted and/or deleted in the amino acid sequence SEQ ID NO: 246. In some embodiments, substitutions, insertions, or deletions occur in regions outside the CDRs (e.g., in the FRs). Optionally, the antibody or antigen-binding fragment thereof comprises the VH sequence SEQ ID NO: 246, including one or more post-translational modifications of that sequence. In a particular embodiment, the VH comprises one, two or three CDRs selected from: a. CDR-H1, comprising the amino acid sequence SEQ ID NO: 788, b. CDR-H2, comprising the amino acid sequence SEQ ID NO: 1330, and c. CDR-H3, comprising the amino acid sequence SEQ ID NO: 1872.

[2803] In one aspect, an antibody or antigen-binding fragment thereof is provided, wherein the antibody or antigen-binding fragment thereof comprises a light chain variable domain (VL) having at least 90%, 91%, 92%, 93%, 94%, 95%, 96%, 97%, 98%, 99%, or 100% sequence identity to the amino acid sequence SEQ ID NO: 517. In some embodiments, a VL sequence having at least 90%, 91%, 92%, 93%, 94%, 95%, 96%, 97%, 98%, or 99% identity contains substitutions (e.g., conservative substitutions), thereof comprising that sequence retains the ability to bind to same antigen as the parent (e.g., cancer associated antigen). In some embodiments, a total of 1 to 10 amino acids have been substituted, inserted and/or deleted in the amino acid sequence SEQ ID NO: 517. In some embodiments, the substitutions, insertions, or deletions occur in regions outside the CDRs (e.g., in the FRs). Optionally, the antibody or antigen-binding fragment thereof comprises the VL sequence SEQ ID NO: 517, including one or more post-translational modifications of that sequence. In a particular embodiment, the VL comprises one, two or three CDRs selected from: a. CDR-L1, comprising the amino acid sequence SEQ ID NO: 1059, b. CDR-L2, comprising the amino acid sequence SEQ ID NO: 1601, and c. CDR-L3, comprising the amino acid sequence SEQ ID NO: 2143.

[2804] In one aspect, an antibody or antigen-binding fragment thereof is provided, wherein the antibody or antigen-binding fragment thereof comprises a VH as in any of the embodiments provided above, and a VL as in any of the embodiments provided above. In some embodiments, the antibody or antigen-binding fragment thereof comprises the VH amino acid sequence of SEQ ID NO: 246, and the VL amino acid sequence of SEQ ID NO: 517, optionally including post-translational modifications of those sequences.

### TTES1007

[2805] In one aspect, the present disclosure provides an antibody or antigen-binding fragment thereof comprising at least one or both variable regions selected from: a. VH comprising the amino acid sequence of SEQ ID NO: 247 and b. VL comprising the amino acid sequence of SEQ ID NO: 518.

[2806] In one aspect, the present disclosure provides an antibody or antigen-binding fragment thereof comprising at least one, two, three, four, five, or six CDRs selected from: a. CDR-H1 comprising the amino acid sequence of SEQ ID NO: 789, b. CDR-H2 comprising the amino acid sequence of SEQ ID NO: 1331, c. CDR-H3 comprising the amino acid sequence of SEQ ID NO: 1873, d. CDR-L1 comprising the amino acid sequence of SEQ ID NO: 1060, e. CDR-L2 comprising the amino acid sequence of SEQ ID NO: 1602, and f. CDR-L3 comprising the amino acid sequence of SEQ ID NO: 2144.

[2807] In one aspect, the present disclosure provides an antibody or antigen-binding fragment thereof comprising a CDR-H3 comprising the amino acid sequence of SEQ ID NO: 1873, and a CDR-L3 comprising the amino acid sequence of SEQ ID NO: 2144.

[2808] In one aspect, the present disclosure provides an antibody or antigen-binding fragment thereof comprising at least one, at least two, or all three VH CDR sequences selected from: a. CDR-H1 comprising the amino acid sequence of SEQ ID NO: 789, b. CDR-H2 comprising the amino acid sequence of SEQ ID NO: 1331, c. CDR-H3 comprising the amino acid sequence of SEQ ID NO: 1873, and a VL comprising the amino acid sequence of SEQ ID NO: 518.

[2809] In one aspect, the present disclosure provides an antibody or antigen-binding fragment thereof comprising at least one, at least two, or all three VL CDR sequences selected from: a. CDR-L1 comprising the amino acid sequence of SEQ ID NO: 1060, b. CDR-L2 comprising the amino acid sequence of SEQ ID NO: 1602, c. CDR-L3 comprising the amino acid sequence of SEQ ID NO: 2144, and a VH comprising the amino acid sequence of SEQ ID NO: 247.

[2810] In one aspect, an antibody or antigen-binding fragment thereof is provided, wherein the antibody or antigen-binding fragment thereof comprises a heavy chain variable domain (VH) having at least 90%, 91%, 92%, 93%, 94%, 95%, 96%, 97%, 98%, 99%, or 100% sequence identity to the amino acid sequence SEQ ID NO: 247. In some embodiments, a VH sequence having at least 90%, 91%, 92%, 93%, 94%, 95%, 96%, 97%, 98%, or 99% identity contains substitutions (e.g., conservative substitutions), insertions, or deletions relative to the reference sequence, but an antibody or antigen-binding fragment thereof comprising that sequence retains the ability to bind to same antigen as of the parent (e.g., cancer associated antigen). In some embodiments, a total of 1 to 10 amino acids have been substituted, inserted and/or deleted in the amino acid sequence SEQ ID NO: 247. In some embodiments, substitutions, insertions, or deletions occur in regions outside the CDRs (e.g., in the FRs). Optionally, the antibody or antigen-binding fragment thereof comprises the VH sequence SEQ ID NO: 247, including one or more post-translational modifications of that sequence. In a particular embodiment, the VH comprises one, two or three CDRs selected from: a. CDR-H1, comprising the amino acid sequence SEQ ID NO: 789, b. CDR-H2, comprising the amino acid sequence SEQ ID NO: 1331, and c. CDR-H3, comprising the amino acid sequence SEQ ID NO: 1873.

[2811] In one aspect, an antibody or antigen-binding fragment thereof is provided, wherein the antibody or antigen-binding fragment thereof comprises a light chain variable domain (VL) having at least 90%, 91%, 92%, 93%, 94%, 95%, 96%, 97%, 98%, 99%, or 100% sequence identity to the amino acid sequence SEQ ID NO: 518. In some embodiments, a VL sequence having at least 90%, 91%, 92%, 93%, 94%, 95%, 96%, 97%, 98%, or 99% identity contains substitutions (e.g., conservative substitutions), insertions, or deletions relative to the reference sequence, but an antibody or antigen-binding fragment thereof comprising that sequence retains the ability to bind to same antigen as the parent (e.g., cancer associated antigen). In some embodiments, a total of 1 to 10 amino acids have been substituted, inserted and/or deleted in the amino acid sequence SEQ ID NO: 518. In some embodiments, the substitutions, insertions, or deletions occur in regions outside the CDRs (e.g., in the FRs). Optionally, the antibody or antigen-binding fragment thereof comprises the VL sequence SEQ ID NO: 518, including one or more post-translational modifications of that sequence. In a particular embodiment, the VL comprises one, two or three CDRs selected from: a. CDR-L1, comprising the amino acid sequence SEQ ID NO: 1060, b. CDR-L2, comprising the amino acid sequence SEQ ID NO: 1602, and c. CDR-L3, comprising the amino acid sequence SEQ ID NO: 2144.

[2812] In one aspect, an antibody or antigen-binding fragment thereof is provided, wherein the antibody or antigen-binding fragment thereof comprises a VH as in any of the embodiments provided above, and a VL as in any of the embodiments provided above. In some embodiments, the antibody or antigen-binding fragment thereof comprises the VH amino acid sequence of SEQ ID NO: 247, and the VL amino acid sequence of SEQ ID NO: 518, optionally including post-translational modifications of those sequences.

### TTES1008

[2813] In one aspect, the present disclosure provides an antibody or antigen-binding fragment thereof comprising at least one or both variable regions selected from: a. VH comprising the amino acid sequence of SEQ ID NO: 248 and b. VL comprising the amino acid sequence of SEQ ID NO: 519.

[2814] In one aspect, the present disclosure provides an antibody or antigen-binding fragment thereof comprising at least one, two, three, four, five, or six CDRs selected from: a. CDR-H1 comprising the amino acid sequence of SEQ ID NO: 790, b. CDR-H2 comprising the amino acid sequence of SEQ ID NO: 1332, c. CDR-H3 comprising the amino acid sequence of SEQ ID NO: 1874, d. CDR-L1 comprising the amino acid sequence of SEQ ID NO: 1061, CDR-L2 comprising the amino acid sequence of SEQ ID NO: 1603, and f. CDR-L3 comprising the amino acid sequence of SEQ ID NO: 2145.

[2815] In one aspect, the present disclosure provides an antibody or antigen-binding fragment thereof comprising at least one, two, three, four, five, or six CDRs selected from: a CDR-H3 comprising the amino acid sequence of SEQ ID NO: 1874, and a CDR-L3 comprising the amino acid sequence of SEQ ID NO: 2145.

[2816] In one aspect, the present disclosure provides an antibody or antigen-binding fragment thereof comprising at least one, at least two, or all three VH CDR sequences selected from: a. CDR-H1 comprising the amino acid sequence of SEQ ID NO: 790, b. CDR-H2 comprising the amino acid sequence of SEQ ID NO: 1332, c. CDR-H3 comprising the amino acid sequence of SEQ ID NO: 1874, and a VL comprising the amino acid sequence of SEQ ID NO: 519.

[2817] In one aspect, the present disclosure provides an antibody or antigen-binding fragment thereof comprising at least one, at least two, or all three VL CDR sequences selected from: a. CDR-L1 comprising the amino acid sequence of SEQ ID NO: 1061, b. CDR-L2 comprising the amino acid sequence of SEQ ID NO: 1603, c. CDR-L3 comprising the amino acid sequence of SEQ ID NO: 2145, and a VH comprising the amino acid sequence of SEQ ID NO: 248.

[2818] In one aspect, an antibody or antigen-binding fragment thereof is provided, wherein the antibody or antigen-binding fragment thereof comprises a heavy chain variable domain (VH) having at least 90%, 91%, 92%, 93%, 94%, 95%, 96%, 97%, 98%, 99%, or 100% sequence identity to the amino acid sequence SEQ ID NO: 248. In some embodiments, a VH sequence having at least 90%, 91%, 92%, 93%, 94%, 95%, 96%, 97%, 98%, or 99% identity contains substitutions (e.g., conservative substitutions), insertions, or deletions relative to the reference sequence, but an antibody or antigen-binding fragment thereof comprising that sequence retains the ability to bind to same antigen as of the parent (e.g., cancer associated antigen). In some embodiments, a total of 1 to 10 amino acids have been substituted, inserted and/or deleted in the amino acid sequence SEQ ID NO: 248. In some embodiments, substitutions, insertions, or deletions occur in regions outside the CDRs (e.g., in the FRs). Optionally, the antibody or antigen-binding fragment thereof comprises the VH sequence SEQ ID NO: 248, including one or more post-translational modifications of that sequence. In a particular embodiment, the VH comprises one, two or three CDRs selected from: a. CDR-H1, comprising the amino acid sequence SEQ ID NO: 790, b. CDR-H2, comprising the amino acid sequence SEQ ID NO: 1332, and c. CDR-H3, comprising the amino acid sequence SEQ ID NO: 1874.

[2819] In one aspect, an antibody or antigen-binding fragment thereof is provided, wherein the antibody or antigen-binding fragment thereof comprises a light chain variable domain (VL) having at least 90%, 91%, 92%, 93%, 94%, 95%, 96%, 97%, 98%, 99%, or 100% sequence identity to the amino acid sequence SEQ ID NO: 519. In some embodiments, a VL sequence having at least 90%, 91%, 92%, 93%, 94%, 95%, 96%, 97%, 98%, or 99% identity contains substitutions (e.g., conservative substitutions), insertions, or deletions relative to the reference sequence, but an antibody or antigen-binding fragment thereof comprising that sequence retains the ability to bind to same antigen as the parent (e.g., cancer associated antigen). In some embodiments, a total of 1 to 10 amino acids have been substituted, inserted and/or deleted in the amino acid sequence SEQ ID NO: 519. In some embodiments, the substitutions, insertions, or deletions occur in regions outside the CDRs (e.g., in the FRs). Optionally, the antibody or antigen-binding fragment thereof comprises the VL sequence SEQ ID NO: 519, including one or more post-translational modifications of that sequence. In a particular embodiment, the VL comprises one, two or three CDRs selected from: a. CDR-L1, comprising the amino acid sequence SEQ ID NO: 1061, b. CDR-L2, comprising the amino acid sequence SEQ ID NO: 1603, and c. CDR-L3, comprising the amino acid sequence SEQ ID NO: 2145.

[2820] In one aspect, an antibody or antigen-binding fragment thereof is provided, wherein the antibody or antigen-binding fragment thereof comprises a VH as in any of the embodiments provided above, and a VL as in any of the embodiments provided above. In some embodiments, the antibody or antigen-binding fragment thereof comprises the VH amino acid sequence of SEQ ID NO: 248, and the VL amino acid sequence of SEQ ID NO: 519, optionally including post-translational modifications of those sequences.

### TTES1009

[2821] In one aspect, the present disclosure provides an antibody or antigen-binding fragment thereof comprising at least one or both variable regions selected from: a. VH comprising the amino acid sequence of SEQ ID NO: 249 and b. VL comprising the amino acid sequence of SEQ ID NO: 520.

[2822] In one aspect, the present disclosure provides an antibody or antigen-binding fragment thereof comprising at least one, two, three, four, five, or six CDRs selected from: a. CDR-H1 comprising the amino acid sequence of SEQ ID NO: 791, b. CDR-H2 comprising the amino acid sequence of SEQ ID NO: 1333, c. CDR-H3 comprising the amino acid sequence of SEQ ID NO: 1875, d. CDR-L1 comprising the amino acid sequence of SEQ ID NO: 1062, e. CDR-L2 comprising the amino acid sequence of SEQ ID NO: 1604, and f. CDR-L3 comprising the amino acid sequence of SEQ ID NO: 2146.

[2823] In one aspect, the present disclosure provides an antibody or antigen-binding fragment thereof comprising a CDR-H3 comprising the amino acid sequence of SEQ ID NO: 1875, and a CDR-L3 comprising the amino acid sequence of SEQ ID NO: 2146.

[2824] In one aspect, the present disclosure provides an antibody or antigen-binding fragment thereof comprising at least one, at least two, or all three VH CDR sequences selected from: a. CDR-H1 comprising the amino acid sequence of SEQ ID NO: 791, b. CDR-H2 comprising the amino acid sequence of SEQ ID NO: 1333, c. CDR-H3 comprising the amino acid sequence of SEQ ID NO: 1875, and a VL comprising the amino acid sequence of SEQ ID NO: 520.

[2825] In one aspect, the present disclosure provides an antibody or antigen-binding fragment thereof comprising at least one, at least two, or all three VL CDR sequences selected from: a. CDR-L1 comprising the amino acid sequence of SEQ ID NO: 1062, b. CDR-L2 comprising the amino acid sequence of SEQ ID NO: 1604, c. CDR-L3 comprising the amino acid sequence of SEQ ID NO: 2146, and a VH comprising the amino acid sequence of SEQ ID NO: 249.

[2826] In one aspect, an antibody or antigen-binding fragment thereof is provided, wherein the antibody or antigen-binding fragment thereof comprises a heavy chain variable domain (VH) having at least 90%, 91%, 92%, 93%, 94%, 95%, 96%, 97%, 98%, 99%, or 100% sequence identity to the amino acid sequence SEQ ID NO: 249. In some embodiments, a VH sequence having at least 90%, 91%, 92%, 93%, 94%, 95%, 96%, 97%, 98%, or 99% identity contains substitutions (e.g., conservative substitutions), insertions, or deletions relative to the reference sequence, but an antibody or antigen-binding fragment thereof comprising that sequence retains the ability to bind to same antigen as of the parent (e.g., cancer associated antigen). In some embodiments, a total of 1 to 10 amino acids have been substituted, inserted and/or deleted in the amino acid sequence SEQ ID NO: 249. In some embodiments, substitutions, insertions, or deletions occur in regions outside the CDRs (e.g., in the FRs). Optionally, the antibody or antigen-binding fragment thereof comprises the VH sequence SEQ ID NO: 249, including one or more post-translational modifications of that sequence. In a particular embodiment, the VH comprises one, two or three CDRs selected from: a. CDR-H1, comprising the amino acid sequence SEQ ID NO: 791, b. CDR-H2, comprising the amino acid sequence SEQ ID NO: 1333, and c. CDR-H3, comprising the amino acid sequence SEQ ID NO: 1875.

[2827] In one aspect, an antibody or antigen-binding fragment thereof is provided, wherein the antibody or antigen-binding fragment thereof comprises a light chain variable domain (VL) having at least 90%, 91%, 92%, 93%, 94%, 95%, 96%, 97%, 98%, 99%, or 100% sequence identity to the amino acid sequence SEQ ID NO: 520. In some embodiments, a VL sequence having at least 90%, 91%, 92%, 93%, 94%, 95%, 96%, 97%, 98%, or 99% identity contains substitutions (e.g., conservative substitutions), insertions, or deletions relative to the reference sequence, but an antibody or antigen-binding fragment thereof comprising that sequence retains the ability to bind to same antigen as the parent (e.g., cancer associated antigen). In some embodiments, a total of 1 to 10 amino acids have been substituted, inserted and/or deleted in the amino acid sequence SEQ ID NO: 520. In some embodiments, the substitutions, insertions, or deletions occur in regions outside the CDRs (e.g., in the FRs). Optionally, the antibody or antigen-binding fragment thereof comprises the VL sequence SEQ ID NO: 520, including one or more post-translational modifications of that sequence. In a particular embodiment, the VL comprises one, two or three CDRs selected from: a. CDR-L1, comprising the amino acid sequence SEQ ID NO: 1062, b. CDR-L2, comprising the amino acid sequence SEQ ID NO: 1604, and c. CDR-L3, comprising the amino acid sequence SEQ ID NO: 2146.

[2828] In one aspect, an antibody or antigen-binding fragment thereof is provided, wherein the antibody or antigen-binding fragment thereof comprises a VH as in any of the embodiments provided above, and a VL as in any of the embodiments provided above. In some embodiments, the antibody or antigen-binding fragment thereof comprises the VH amino acid sequence of SEQ ID NO: 249, and the VL amino acid sequence of SEQ ID NO: 520, optionally including post-translational modifications of those sequences.

### TTES1010

[2829] In one aspect, the present disclosure provides an antibody or antigen-binding fragment thereof comprising at least one or both variable regions selected from: a. VH comprising the amino acid sequence of SEQ ID NO: 250 and b. VL comprising the amino acid sequence of SEQ ID NO: 521.

[2830] In one aspect, the present disclosure provides an antibody or antigen-binding fragment thereof comprising at least one, two, three, four, five, or six CDRs selected from: a. CDR-H1 comprising the amino acid sequence of SEQ ID NO: 792, b. CDR-H2 comprising the amino acid sequence of SEQ ID NO: 1334, c. CDR-H3 comprising the amino acid sequence of SEQ ID NO: 1876, d. CDR-L1 comprising the amino acid sequence of SEQ ID NO: 1063, e. CDR-L2 comprising the amino acid sequence of SEQ ID NO: 1605, and f. CDR-L3 comprising the amino acid sequence of SEQ ID NO: 2147.

[2831] In one aspect, the present disclosure provides an antibody or antigen-binding fragment thereof comprising a CDR-H3 comprising the amino acid sequence of SEQ ID NO: 1876, and a CDR-L3 comprising the amino acid sequence of SEQ ID NO: 2147.

[2832] In one aspect, the present disclosure provides an antibody or antigen-binding fragment thereof comprising at least one, at least two, or all three VH CDR sequences selected from: a. CDR-H1 comprising the amino acid sequence of SEQ ID NO: 792, b. CDR-H2 comprising the amino acid sequence of SEQ ID NO: 1334, c. CDR-H3 comprising the amino acid sequence of SEQ ID NO: 1876, and a VL comprising the amino acid sequence of SEQ ID NO: 521.

[2833] In one aspect, the present disclosure provides an antibody or antigen-binding fragment thereof comprising at least one, at least two, or all three VL CDR sequences selected from: a. CDR-L1 comprising the amino acid sequence of SEQ ID NO: 1063, b. CDR-L2 comprising the amino acid sequence of SEQ ID NO: 1605, c. CDR-L3 comprising the amino acid sequence of SEQ ID NO: 2147, and a VH comprising the amino acid sequence of SEQ ID NO: 250.

[2834] In one aspect, an antibody or antigen-binding fragment thereof is provided, wherein the antibody or antigen-binding fragment thereof comprises a heavy chain variable domain (VH) having at least 90%, 91%, 92%, 93%, 94%, 95%, 96%, 97%, 98%, 99%, or 100% sequence identity to the amino acid sequence SEQ ID NO: 250. In some embodiments, a VH sequence having at least 90%, 91%, 92%, 93%, 94%, 95%, 96%, 97%, 98%, or 99% identity contains substitutions (e.g., conservative substitutions), insertions, or deletions relative to the reference sequence, but an antibody or antigen-binding fragment thereof comprising that sequence retains the ability to bind to same antigen as of the parent (e.g., cancer associated antigen). In some embodiments, a total of 1 to 10 amino acids have been substituted, inserted and/or deleted in the amino acid sequence SEQ ID NO: 250. In some embodiments, substitutions, insertions, or deletions occur in regions outside the CDRs (e.g., in the FRs). Optionally, the antibody or antigen-binding fragment thereof comprises the VH sequence SEQ ID NO: 250, including one or more post-translational modifications of that sequence. In a particular embodiment, the VH comprises one, two or three CDRs selected from: a. CDR-H1, comprising the amino acid sequence SEQ ID NO: 792, b. CDR-H2, comprising the amino acid sequence SEQ ID NO: 1334, and c. CDR-H3, comprising the amino acid sequence SEQ ID NO: 1876.

[2835] In one aspect, an antibody or antigen-binding fragment thereof is provided, wherein the antibody or antigen-binding fragment thereof comprises a light chain variable domain (VL) having at least 90%, 91%, 92%, 93%, 94%, 95%, 96%, 97%, 98%, 99%, or 100% sequence identity to the amino acid sequence SEQ ID NO: 521. In some embodiments, a VL sequence having at least 90%, 91%, 92%, 93%, 94%, 95%, 96%, 97%, 98%, or 99% identity contains substitutions (e.g., conservative substitutions), insertions, or deletions relative to the reference sequence, but an antibody or antigen-binding fragment thereof comprising that sequence retains the ability to bind to same antigen as the parent (e.g., cancer associated antigen). In some embodiments, a total of 1 to 10 amino acids have been substituted, inserted and/or deleted in the amino acid sequence SEQ ID NO: 521. In some embodiments, the substitutions, insertions, or deletions occur in regions outside the CDRs (e.g., in the FRs). Optionally, the antibody or antigen-binding fragment thereof comprises the VL sequence SEQ ID NO: 521, including one or more post-translational modifications of that sequence. In a particular embodiment, the VL comprises one, two or three CDRs selected from: a. CDR-L1, comprising the amino acid sequence SEQ ID NO: 1063, b. CDR-L2, comprising the amino acid sequence SEQ ID NO: 1605, and c. CDR-L3, comprising the amino acid sequence SEQ ID NO: 2147.

[2836] In one aspect, an antibody or antigen-binding fragment thereof is provided, wherein the antibody or antigen-binding fragment thereof comprises a VH as in any of the embodiments provided above, and a VL as in any of the embodiments provided above. In some embodiments, the antibody or antigen-binding fragment thereof comprises the VH amino acid sequence of SEQ ID NO: 250, and the VL amino acid sequence of SEQ ID NO: 521, optionally including post-translational modifications of those sequences.

### TTES1011

[2837] In one aspect, the present disclosure provides an antibody or antigen-binding fragment thereof comprising at least one or both variable regions selected from: a. VH comprising the amino acid sequence of SEQ ID NO: 251 and b. VL comprising the amino acid sequence of SEQ ID NO: 522.

[2838] In one aspect, the present disclosure provides an antibody or antigen-binding fragment thereof comprising at least one, two, three, four, five, or six CDRs selected from: a. CDR-H1 comprising the amino acid sequence of SEQ ID NO: 793, b. CDR-H2 comprising the amino acid sequence of SEQ ID NO: 1335, c. CDR-H3 comprising the amino acid sequence of SEQ ID NO: 1877, d. CDR-L1 comprising the amino acid sequence of SEQ ID NO: 1064, e. CDR-L2 comprising the amino acid sequence of SEQ ID NO: 1606, and f. CDR-L3 comprising the amino acid sequence of SEQ ID NO: 2148.

[2839] In one aspect, the present disclosure provides an antibody or antigen-binding fragment thereof comprising a CDR-H3 comprising the amino acid sequence of SEQ ID NO: 1877, and a CDR-L3 comprising the amino acid sequence of SEQ ID NO: 2148.

[2840] In one aspect, the present disclosure provides an antibody or antigen-binding fragment thereof comprising at least one, at least two, or all three VH CDR sequences selected from: a. CDR-H1 comprising the amino acid sequence of SEQ ID NO: 793, b. CDR-H2 comprising the amino acid sequence of SEQ ID NO: 1335, c. CDR-H3 comprising the amino acid sequence of SEQ ID NO: 1877, and a VL comprising the amino acid sequence of SEQ ID NO: 522.

[2841] In one aspect, the present disclosure provides an antibody or antigen-binding fragment thereof comprising at least one, at least two, or all three VL CDR sequences selected from: a. CDR-L1 comprising the amino acid sequence of SEQ ID NO: 1064, b. CDR-L2 comprising the amino acid sequence of SEQ ID NO: 1606, c. CDR-L3 comprising the amino acid sequence of SEQ ID NO: 2148, and a VH comprising the amino acid sequence of SEQ ID NO: 251.

[2842] In one aspect, an antibody or antigen-binding fragment thereof is provided, wherein the antibody or antigen-binding fragment thereof comprises a heavy chain variable domain (VH) having at least 90%, 91%, 92%, 93%, 94%, 95%, 96%, 97%, 98%, 99%, or 100% sequence identity to the amino acid sequence SEQ ID NO: 251. In some embodiments, a VH sequence having at least 90%, 91%, 92%, 93%, 94%, 95%, 96%, 97%, 98%, or 99% identity contains substitutions (e.g., conservative substitutions), insertions, or deletions relative to the reference sequence, but an antibody or antigen-binding fragment thereof comprising that sequence retains the ability to bind to same antigen as of the parent (e.g., cancer associated antigen). In some embodiments, a total of 1 to 10 amino acids have been substituted, inserted and/or deleted in the amino acid sequence SEQ ID NO: 251. In some embodiments, substitutions, insertions, or deletions occur in regions outside the CDRs (e.g., in the FRs). Optionally, the antibody or antigen-binding fragment thereof comprises the VH sequence SEQ ID NO: 251, including one or more post-translational modifications of that sequence. In a particular embodiment, the VH comprises one, two or three CDRs selected from: a. CDR-H1, comprising the amino acid sequence SEQ ID NO: 793, b. CDR-H2, comprising the amino acid sequence SEQ ID NO: 1335, and c. CDR-H3, comprising the amino acid sequence SEQ ID NO: 1877.

[2843] In one aspect, an antibody or antigen-binding fragment thereof is provided, wherein the antibody or antigen-binding fragment thereof comprises a light chain variable domain (VL) having at least 90%, 91%, 92%, 93%, 94%, 95%, 96%, 97%, 98%, 99%, or 100% sequence identity to the amino acid sequence SEQ ID NO: 522. In some embodiments, a VL sequence having at least 90%, 91%, 92%, 93%, 94%, 95%, 96%, 97%, 98%, or 99% identity contains substitutions (e.g., conservative substitutions), insertions, or deletions relative to the reference sequence, but an antibody or antigen-binding fragment thereof comprising that sequence retains the ability to bind to same antigen as the parent (e.g., cancer associated antigen). In some embodiments, a total of 1 to 10 amino acids have been substituted, inserted and/or deleted in the amino acid sequence SEQ ID NO: 522. In some embodiments, the substitutions, insertions, or deletions occur in regions outside the CDRs (e.g., in the FRs). Optionally, the antibody or antigen-binding fragment thereof comprises the VL sequence SEQ ID NO: 522, including one or more post-translational modifications of that sequence. In a particular embodiment, the VL comprises one, two or three CDRs selected from: a. CDR-L1, comprising the amino acid sequence SEQ ID NO: 1064, b. CDR-L2, comprising the amino acid sequence SEQ ID NO: 1606, and c. CDR-L3, comprising the amino acid sequence SEQ ID NO: 2148.

[2844] In one aspect, an antibody or antigen-binding fragment thereof is provided, wherein the antibody or antigen-binding fragment thereof comprises a VH as in any of the embodiments provided above, and a VL as in any of the embodiments provided above. In some embodiments, the antibody or antigen-binding fragment thereof comprises the VH amino acid sequence of SEQ ID NO: 251, and the VL amino acid sequence of SEQ ID NO: 522, optionally including post-translational modifications of those sequences.

### TTES1012

[2845] In one aspect, the present disclosure provides an antibody or antigen-binding fragment thereof comprising at least one or both variable regions selected from: a. VH comprising the amino acid sequence of SEQ ID NO: 252 and b. VL comprising the amino acid sequence of SEQ ID NO: 523.

[2846] In one aspect, the present disclosure provides an antibody or antigen-binding fragment thereof comprising at least one, two, three, four, five, or six CDRs selected from: a. CDR-H1 comprising the amino acid sequence of SEQ ID NO: 794, b. CDR-H2 comprising the amino acid sequence of SEQ ID NO: 1336, c. CDR-H3 comprising the amino acid sequence of SEQ ID NO: 1878, d. CDR-L1 comprising the amino acid sequence of SEQ ID NO: 1065, e. CDR-L2 comprising the amino acid sequence of SEQ ID NO: 1607, and f. CDR-L3 comprising the amino acid sequence of SEQ ID NO: 2149.

[2847] In one aspect, the present disclosure provides an antibody or antigen-binding fragment thereof comprising a CDR-H3 comprising the amino acid sequence of SEQ ID NO: 1878, and a CDR-L3 comprising the amino acid sequence of SEQ ID NO: 2149.

[2848] In one aspect, the present disclosure provides an antibody or antigen-binding fragment thereof comprising at least one, at least two, or all three VH CDR sequences selected from: a. CDR-H1 comprising the amino acid sequence of SEQ ID NO: 794, b. CDR-H2 comprising the amino acid sequence of SEQ ID NO: 1336, c. CDR-H3 comprising the amino acid sequence of SEQ ID NO: 1878, and a VL comprising the amino acid sequence of SEQ ID NO: 523.

[2849] In one aspect, the present disclosure provides an antibody or antigen-binding fragment thereof comprising at least one, at least two, or all three VL CDR sequences selected from: a. CDR-L1 comprising the amino acid sequence of SEQ ID NO: 1065, b. CDR-L2 comprising the amino acid sequence of SEQ ID NO: 1607, c. CDR-L3 comprising the amino acid sequence of SEQ ID NO: 2149, and a VH comprising the amino acid sequence of SEQ ID NO: 252.

[2850] In one aspect, an antibody or antigen-binding fragment thereof is provided, wherein the antibody or antigen-binding fragment thereof comprises a heavy chain variable domain (VH) having at least 90%, 91%, 92%, 93%, 94%, 95%, 96%, 97%, 98%, 99%, or 100% sequence identity to the amino acid sequence SEQ ID NO: 252. In some embodiments, a VH sequence having at least 90%, 91%, 92%, 93%, 94%, 95%, 96%, 97%, 98%, or 99% identity contains substitutions (e.g., conservative substitutions), insertions, or deletions relative to the reference sequence, but an antibody or antigen-binding fragment thereof comprising that sequence retains the ability to bind to same antigen as of the parent (e.g., cancer associated antigen). In some embodiments, a total of 1 to 10 amino acids have been substituted, inserted and/or deleted in the amino acid sequence SEQ ID NO: 252. In some embodiments, substitutions, antigen-binding fragment thereof comprises the VH sequence SEQ ID NO: 252, including one or more post-translational modifications of that sequence. In a particular embodiment, the VH comprises one, two or three CDRs selected from: a. CDR-H1, comprising the amino acid sequence SEQ ID NO: 794, b. CDR-H2, comprising the amino acid sequence SEQ ID NO: 1336, and c. CDR-H3, comprising the amino acid sequence SEQ ID NO: 1878.

[2851] In one aspect, an antibody or antigen-binding fragment thereof is provided, wherein the antibody or antigen-binding fragment thereof comprises a light chain variable domain (VL) having at least 90%, 91%, 92%, 93%, 94%, 95%, 96%, 97%, 98%, 99%, or 100% sequence identity to the amino acid sequence SEQ ID NO: 523. In some embodiments, a VL sequence having at least 90%, 91%, 92%, 93%, 94%, 95%, 96%, 97%, 98%, or 99% identity contains substitutions (e.g., conservative substitutions), insertions, or deletions relative to the reference sequence, but an antibody or antigen-binding fragment thereof comprising that sequence retains the ability to bind to same antigen as the parent (e.g., cancer associated antigen). In some embodiments, a total of 1 to 10 amino acids have been substituted, inserted and/or deleted in the amino acid sequence SEQ ID NO: 523. In some embodiments, the substitutions, insertions, or deletions occur in regions outside the CDRs (e.g., in the FRs). Optionally, the antibody or antigen-binding fragment thereof comprises the VL sequence SEQ ID NO: 523, including one or more post-translational modifications of that sequence. In a particular embodiment, the VL comprises one, two or three CDRs selected from: a. CDR-L1, comprising the amino acid sequence SEQ ID NO: 1065, b. CDR-L2, comprising the amino acid sequence SEQ ID NO: 1607, and c. CDR-L3, comprising the amino acid sequence SEQ ID NO: 2149.

[2852] In one aspect, an antibody or antigen-binding fragment thereof is provided, wherein the antibody or antigen-binding fragment thereof comprises a VH as in any of the embodiments provided above, and a VL as in any of the embodiments provided above. In some embodiments, the antibody or antigen-binding fragment thereof comprises the VH amino acid sequence of SEQ ID NO: 252, and the VL amino acid sequence of SEQ ID NO: 523, optionally including post-translational modifications of those sequences.

### TTHY1001

[2853] In one aspect, the present disclosure provides an antibody or antigen-binding fragment thereof comprising at least one or both variable regions selected from: a. VH comprising the amino acid sequence of SEQ ID NO: 253 and b. VL comprising the amino acid sequence of SEQ ID NO: 524.

[2854] In one aspect, the present disclosure provides an antibody or antigen-binding fragment thereof comprising at least one, two, three, four, five, or six CDRs selected from: a CDR-H1 comprising the amino acid sequence of SEQ ID NO: 795, b. CDR-H2 comprising the amino acid sequence of SEQ ID NO: 1337, c. CDR-H3 comprising the amino acid sequence of SEQ ID NO: 1879, d. CDR-L1 comprising the amino acid sequence of SEQ ID NO: 1066, e. CDR-L2 comprising the amino acid sequence of SEQ ID NO: 1608, and f. CDR-L3 comprising the amino acid sequence of SEQ ID NO: 2150.

[2855] In one aspect, the present disclosure provides an antibody or antigen-binding fragment thereof comprising a CDR-H3 comprising the amino acid sequence of SEQ ID NO: 1879, and a CDR-L3 comprising the amino acid sequence of SEQ ID NO: 2150.

[2856] In one aspect, the present disclosure provides an antibody or antigen-binding fragment thereof comprising at least one, at least two, or all three VH CDR sequences selected from: a. CDR-H1 comprising the amino acid sequence of SEQ ID NO: 795, b. CDR-H2 comprising the amino acid sequence of SEQ ID NO: 1337, c. CDR-H3 comprising the amino acid sequence of SEQ ID NO: 1879, and a VL comprising the amino acid sequence of SEQ ID NO: 524.

[2857] In one aspect, the present disclosure provides an antibody or antigen-binding fragment thereof comprising at least one, at least two, or all three VL CDR sequences selected from: a. CDR-L1 comprising the amino acid sequence of SEQ ID NO: 1066, b. CDR-L2 comprising the amino acid sequence of SEQ ID NO: 1608, c. CDR-L3 comprising the amino acid sequence of SEQ ID NO: 2150, and a VH comprising the amino acid sequence of SEQ ID NO: 253.

[2858] In one aspect, an antibody or antigen-binding fragment thereof is provided, wherein the antibody or antigen-binding fragment thereof comprises a heavy chain variable domain (VH) having at least 90%, 91%, 92%, 93%, 94%, 95%, 96%, 97%, 98%, 99%, or 100% sequence identity to the amino acid sequence SEQ ID NO: 253. In some embodiments, a VH sequence having at least 90%, 91%, 92%, 93%, 94%, 95%, 96%, 97%, 98%, or 99% identity contains substitutions (e.g., conservative substitutions), insertions, or deletions relative to the reference sequence, but an antibody or antigen-binding fragment thereof comprising that sequence retains the ability to bind to same antigen as of the parent (e.g., cancer associated antigen). In some embodiments, a total of 1 to 10 amino acids have been substituted, inserted and/or deleted in the amino acid sequence SEQ ID NO: 253. In some embodiments, substitutions, insertions, or deletions occur in regions outside the CDRs (e.g., in the FRs). Optionally, the antibody or antigen-binding fragment thereof comprises the VH sequence SEQ ID NO: 253, including one or more post-translational modifications of that sequence. In a particular embodiment, the VH comprises one, two or three CDRs selected from: a. CDR-H1, comprising the amino acid sequence SEQ ID NO: 795, b. CDR-H2, comprising the amino acid sequence SEQ ID NO: 1337, and c. CDR-H3, comprising the amino acid sequence SEQ ID NO: 1879.

[2859] In one aspect, an antibody or antigen-binding fragment thereof is provided, wherein the antibody or antigen-binding fragment thereof comprises a light chain variable domain (VL) having at least 90%, 91%, 92%, 93%, 94%, 95%, 96%, 97%, 98%, 99%, or 100% sequence identity to the amino acid sequence SEQ ID NO: 524. In some embodiments, a VL sequence having at least 90%, 91%, 92%, 93%, 94%, 95%, 96%, 97%, 98%, or 99% identity contains substitutions (e.g., conservative substitutions), insertions, or deletions relative to the reference sequence, but an antibody or antigen-binding fragment thereof comprising that sequence retains the ability to bind to same antigen as the parent (e.g., cancer associated antigen). In some embodiments, a total of 1 to 10 amino acids have been substituted, inserted and/or deleted in the amino acid sequence SEQ ID NO: 524. In some embodiments, the substitutions, insertions, or deletions occur in regions outside the CDRs (e.g., in the FRs). Optionally, the antibody or antigen-binding fragment thereof comprises the VL sequence SEQ ID NO: 524, including one or more post-translational modifications of that sequence. In a particular embodiment, the VL comprises one, two or three CDRs selected from: a. CDR-L1, comprising the amino acid sequence SEQ ID NO: 1066, b. CDR-L2, comprising the amino acid sequence SEQ ID NO: 1608, and c. CDR-L3, comprising the amino acid sequence SEQ ID NO: 2150.

[2860] In one aspect, an antibody or antigen-binding fragment thereof is provided, wherein the antibody or antigen-binding fragment thereof comprises a VH as in any of the embodiments provided above, and a VL as in any of the embodiments provided above. In some embodiments, the antibody or antigen-binding fragment thereof comprises the VH amino acid sequence of SEQ ID NO: 253, and the VL amino acid sequence of SEQ ID NO: 524, optionally including post-translational modifications of those sequences.

### TTHY1002

[2861] In one aspect, the present disclosure provides an antibody or antigen-binding fragment thereof comprising at least one or both variable regions selected from: a. VH comprising the amino acid sequence of SEQ ID NO: 254 and b. VL comprising the amino acid sequence of SEQ ID NO: 525.

[2862] In one aspect, the present disclosure provides an antibody or antigen-binding fragment thereof comprising at least one, two, three, four, five, or six CDRs selected from: a. CDR-H1 comprising the amino acid sequence of SEQ ID NO: 796, b. CDR-H2 comprising the amino acid sequence of SEQ ID NO: 1338, c. CDR-H3 comprising the amino acid sequence of SEQ ID NO: 1880, d. CDR-L1 comprising the amino acid sequence of SEQ ID NO: 1067, e. CDR-L2 comprising the amino acid sequence of SEQ ID NO: 1609, and f. CDR-L3 comprising the amino acid sequence of SEQ ID NO: 2151.

[2863] In one aspect, the present disclosure provides an antibody or antigen-binding fragment thereof comprising a CDR-H3 comprising the amino acid sequence of SEQ ID NO: 1880 and a CDR-L3 comprising the amino acid sequence of SEQ ID NO: 2151.

[2864] In one aspect, the present disclosure provides an antibody or antigen-binding fragment thereof comprising at least one, at least two, or all three VH CDR sequences selected from: a. CDR-H1 comprising the amino acid sequence of SEQ ID NO: 796, b. CDR-H2 comprising the amino acid sequence of SEQ ID NO: 1338, c. CDR-H3 comprising the amino acid sequence of SEQ ID NO: 1880, and a VL comprising the amino acid sequence of SEQ ID NO: 525.

[2865] In one aspect, the present disclosure provides an antibody or antigen-binding fragment thereof comprising at least one, at least two, or all three VL CDR sequences selected from: a. CDR-L1 comprising the amino acid sequence of SEQ ID NO: 1067, b. CDR-L2 comprising the amino acid sequence of SEQ ID NO: 1609, c. CDR-L3 comprising the amino acid sequence of SEQ ID NO: 2151, and a VH comprising the amino acid sequence of SEQ ID NO: 254.

[2866] In one aspect, an antibody or antigen-binding fragment thereof is provided, wherein the antibody or antigen-binding fragment thereof comprises a heavy chain variable domain (VH) having at least 90%, 91%, 92%, 93%, 94%, 95%, 96%, 97%, 98%, 99%, or 100% sequence identity to the amino acid sequence SEQ ID NO: 254. In some embodiments, a VH sequence having at least 90%, 91%, 92%, 93%, 94%, 95%, 96%, 97%, 98%, or 99% identity contains substitutions (e.g., conservative substitutions), insertions, or deletions relative to the reference sequence, but an antibody or antigen-binding fragment thereof comprising that sequence retains the ability to bind to same antigen as of the parent (e.g., cancer associated antigen). In some embodiments, a total of 1 to 10 amino acids have been substituted, inserted and/or deleted in the amino acid sequence SEQ ID NO: 254. In some embodiments, substitutions, insertions, or deletions occur in regions outside the CDRs (e.g., in the FRs). Optionally, the antibody or antigen-binding fragment thereof comprises the VH sequence SEQ ID NO: 254, including one or more post-translational modifications of that sequence. In a particular embodiment, the VH comprises one, two or three CDRs selected from: a. CDR-H1, comprising the amino acid sequence SEQ ID NO: 796, b. CDR-H2, comprising the amino acid sequence SEQ ID NO: 1338, and c. CDR-H3, comprising the amino acid sequence SEQ ID NO: 1880.

[2867] In one aspect, an antibody or antigen-binding fragment thereof is provided, wherein the antibody or antigen-binding fragment thereof comprises a light chain variable domain (VL) having at least 90%, 91%, 92%, 93%, 94%, 95%, 96%, 97%, 98%, 99%, or 100% sequence identity to the amino acid sequence SEQ ID NO: 525. In some embodiments, a VL sequence having at least 90%, 91%, 92%, 93%, 94%, 95%, 96%, 97%, 98%, or 99% identity contains substitutions (e.g., conservative substitutions), insertions, or deletions relative to the reference sequence, but an antibody or antigen-binding fragment thereof comprising that sequence retains the ability to bind to same antigen as the parent (e.g., cancer associated antigen). In some embodiments, a total of 1 to 10 amino acids have been substituted, inserted and/or deleted in the amino acid sequence SEQ ID NO: 525. In some embodiments, the substitutions, insertions, or deletions occur in regions outside the CDRs (e.g., in the FRs). Optionally, the antibody or antigen-binding fragment thereof comprises the VL sequence SEQ ID NO: 525, including one or more post-translational modifications of that sequence. In a particular embodiment, the VL comprises one, two or three CDRs selected from: a. CDR-L1, comprising the amino acid sequence SEQ ID NO: 1067, b. CDR-L2, comprising the amino acid sequence SEQ ID NO: 1609, and c. CDR-L3, comprising the amino acid sequence SEQ ID NO: 2151.

[2868] In one aspect, an antibody or antigen-binding fragment thereof is provided, wherein the antibody or antigen-binding fragment thereof comprises a VH as in any of the embodiments provided above, and a VL as in any of the embodiments provided above. In some embodiments, the antibody or antigen-binding fragment thereof comprises the VH amino acid sequence of SEQ ID NO: 254, and the VL amino acid sequence of SEQ ID NO: 525, optionally including post-translational modifications of those sequences.

### TTHY1003

[2869] In one aspect, the present disclosure provides an antibody or antigen-binding fragment thereof comprising at least one or both variable regions selected from: a. VH comprising the amino acid sequence of SEQ ID NO: 255 and b. VL comprising the amino acid sequence of SEQ ID NO: 526.

[2870] In one aspect, the present disclosure provides an antibody or antigen-binding fragment thereof comprising at least one, two, three, four, five, or six CDRs selected from: a. CDR-H1 comprising the amino acid sequence of SEQ ID NO: 797, b. CDR-H2 comprising the amino acid sequence of SEQ ID NO: 1339, c. CDR-H3 comprising the amino acid sequence of SEQ ID NO: 1881, d. CDR-L1 comprising the amino acid sequence of SEQ ID NO: 1068, e. CDR-L2 comprising the amino acid sequence of SEQ ID NO: 1610, and f. CDR-L3 comprising the amino acid sequence of SEQ ID NO: 2152.

[2871] In one aspect, the present disclosure provides an antibody or antigen-binding fragment thereof comprising a CDR-H3 comprising the amino acid sequence of SEQ ID NO: 1881 and a CDR-L3 comprising the amino acid sequence of SEQ ID NO: 2152.

[2872] In one aspect, the present disclosure provides an antibody or antigen-binding fragment thereof comprising at least one, at least two, or all three VH CDR sequences selected from: a. CDR-H1 comprising the amino acid sequence of SEQ ID NO: 797, b. CDR-H2 comprising the amino acid sequence of SEQ ID NO: 1339, c. CDR-H3 comprising the amino acid sequence of SEQ ID NO: 1881, and a VL comprising the amino acid sequence of SEQ ID NO: 526.

[2873] In one aspect, the present disclosure provides an antibody or antigen-binding fragment thereof comprising at least one, at least two, or all three VL CDR sequences selected from: a. CDR-L1 comprising the amino acid sequence of SEQ ID NO: 1068, b. CDR-L2 comprising the amino acid sequence of SEQ ID NO: 1610, c. CDR-L3 comprising the amino acid sequence of SEQ ID NO: 2152, and a VH comprising the amino acid sequence of SEQ ID NO: 255.

[2874] In one aspect, an antibody or antigen-binding fragment thereof is provided, wherein the antibody or antigen-binding fragment thereof comprises a heavy chain variable domain (VH) having at least 90%, 91%, 92%, 93%, 94%, 95%, 96%, 97%, 98%, 99%, or 100% sequence identity to the amino acid sequence SEQ ID NO: 255. In some embodiments, a VH sequence having at least 90%, 91%, 92%, 93%, 94%, 95%, 96%, 97%, 98%, or 99% identity contains substitutions (e.g., conservative substitutions), insertions, or deletions relative to the reference sequence, but an antibody or antigen-binding fragment thereof comprising that sequence retains the ability to bind to same antigen as of the parent (e.g., cancer associated antigen). In some embodiments, a total of 1 to 10 amino acids have been substituted, inserted and/or deleted in the amino acid sequence SEQ ID NO: 255. In some embodiments, substitutions, insertions, or deletions occur in regions outside the CDRs (e.g., in the FRs). Optionally, the antibody or antigen-binding fragment thereof comprises the VH sequence SEQ ID NO: 255, including one or more post-translational modifications of that sequence. In a particular embodiment, the VH comprises one, two or three CDRs selected from: a. CDR-H1, comprising the amino acid sequence SEQ ID NO: 797, b. CDR-H2, comprising the amino acid sequence SEQ ID NO: 1339, and c. CDR-H3, comprising the amino acid sequence SEQ ID NO: 1881.

[2875] In one aspect, an antibody or antigen-binding fragment thereof is provided, wherein the antibody or antigen-binding fragment thereof comprises a light chain variable domain (VL) having at least 90%, 91%, 92%, 93%, 94%, 95%, 96%, 97%, 98%, 99%, or 100% sequence identity to the amino acid sequence SEQ ID NO: 526. In some embodiments, a VL sequence having at least 90%, 91%, 92%, 93%, 94%, 95%, 96%, 97%, 98%, or 99% identity contains substitutions (e.g., conservative substitutions), insertions, or deletions relative to the reference sequence, but an antibody or antigen-binding fragment thereof comprising that sequence retains the ability to bind to same antigen as the parent (e.g., cancer associated antigen). In some embodiments, a total of 1 to 10 amino acids have been substituted, inserted and/or deleted in the amino acid sequence SEQ ID NO: 526. In some embodiments, the substitutions, antigen-binding fragment thereof comprises the VL sequence SEQ ID NO: 526, including one or more post-translational modifications of that sequence. In a particular embodiment, the VL comprises one, two or three CDRs selected from: a. CDR-L1, comprising the amino acid sequence SEQ ID NO: 1068, b. CDR-L2, comprising the amino acid sequence SEQ ID NO: 1610, and c. CDR-L3, comprising the amino acid sequence SEQ ID NO: 2152.

[2876] In one aspect, an antibody or antigen-binding fragment thereof is provided, wherein the antibody or antigen-binding fragment thereof comprises a VH as in any of the embodiments provided above, and a VL as in any of the embodiments provided above. In some embodiments, the antibody or antigen-binding fragment thereof comprises the VH amino acid sequence of SEQ ID NO: 255, and the VL amino acid sequence of SEQ ID NO: 526, optionally including post-translational modifications of those sequences.

### TTHY1004

[2877] In one aspect, the present disclosure provides an antibody or antigen-binding fragment thereof comprising at least one or both variable regions selected from: a. VH comprising the amino acid sequence of SEQ ID NO: 256 and b. VL comprising the amino acid sequence of SEQ ID NO: 527.

[2878] In one aspect, the present disclosure provides an antibody or antigen-binding fragment thereof comprising at least one, two, three, four, five, or six CDRs selected from: a. CDR-H1 comprising the amino acid sequence of SEQ ID NO: 798, b. CDR-H2 comprising the amino acid sequence of SEQ ID NO: 1340, c. CDR-H3 comprising the amino acid sequence of SEQ ID NO: 1882, d. CDR-L1 comprising the amino acid sequence of SEQ ID NO: 1069, e. CDR-L2 comprising the amino acid sequence of SEQ ID NO: 1611, and f. CDR-L3 comprising the amino acid sequence of SEQ ID NO: 2153.

[2879] In one aspect, the present disclosure provides an antibody or antigen-binding fragment thereof comprising a CDR-H3 comprising the amino acid sequence of SEQ ID NO: 1882, and a CDR-L3 comprising the amino acid sequence of SEQ ID NO: 2153.

[2880] In one aspect, the present disclosure provides an antibody or antigen-binding fragment thereof comprising at least one, at least two, or all three VH CDR sequences selected from: a. CDR-H1 comprising the amino acid sequence of SEQ ID NO: 798, b. CDR-H2 comprising the amino acid sequence of SEQ ID NO: 1340, c. CDR-H3 comprising the amino acid sequence of SEQ ID NO: 1882, and a VL comprising the amino acid sequence of SEQ ID NO: 527.

[2881] In one aspect, the present disclosure provides an antibody or antigen-binding fragment thereof comprising at least one, at least two, or all three VL CDR sequences selected from: a. CDR-L1 comprising the amino acid sequence of SEQ ID NO: 1069, b. CDR-L2 comprising the amino acid sequence of SEQ ID NO: 1611, c. CDR-L3 comprising the amino acid sequence of SEQ ID NO: 2153, and a VH comprising the amino acid sequence of SEQ ID NO: 256.

[2882] In one aspect, an antibody or antigen-binding fragment thereof is provided, wherein the antibody or antigen-binding fragment thereof comprises a heavy chain variable domain (VH) having at least 90%, 91%, 92%, 93%, 94%, 95%, 96%, 97%, 98%, 99%, or 100% sequence identity to the amino acid sequence SEQ ID NO: 256. In some embodiments, a VH sequence having at least 90%, 91%, 92%, 93%, 94%, 95%, 96%, 97%, 98%, or 99% identity contains substitutions (e.g., conservative substitutions), insertions, or deletions relative to the reference sequence, but an antibody or antigen-binding fragment thereof comprising that sequence retains the ability to bind to same antigen as of the parent (e.g., cancer associated antigen). In some embodiments, a total of 1 to 10 amino acids have been substituted, inserted and/or deleted in the amino acid sequence SEQ ID NO: 256. In some embodiments, substitutions, insertions, or deletions occur in regions outside the CDRs (e.g., in the FRs). Optionally, the antibody or antigen-binding fragment thereof comprises the VH sequence SEQ ID NO: 256, including one or more post-translational modifications of that sequence. In a particular embodiment, the VH comprises one, two or three CDRs selected from: a. CDR-H1, comprising the amino acid sequence SEQ ID NO: 798, b. CDR-H2, comprising the amino acid sequence SEQ ID NO: 1340, and c. CDR-H3, comprising the amino acid sequence SEQ ID NO: 1882.

[2883] In one aspect, an antibody or antigen-binding fragment thereof is provided, wherein the antibody or antigen-binding fragment thereof comprises a light chain variable domain (VL) having at least 90%, 91%, 92%, 93%, 94%, 95%, 96%, 97%, 98%, 99%, or 100% sequence identity to the amino acid sequence SEQ ID NO: 527. In some embodiments, a VL sequence having at least 90%, 91%, 92%, 93%, 94%, 95%, 96%, 97%, 98%, or 99% identity contains substitutions (e.g., conservative substitutions), insertions, or deletions relative to the reference sequence, but an antibody or antigen-binding fragment thereof comprising that sequence retains the ability to bind to same antigen as the parent (e.g., cancer associated antigen). In some embodiments, a total of 1 to 10 amino acids have been substituted, inserted and/or deleted in the amino acid sequence SEQ ID NO: 527. In some embodiments, the substitutions, insertions, or deletions occur in regions outside the CDRs (e.g., in the FRs). Optionally, the antibody or antigen-binding fragment thereof comprises the VL sequence SEQ ID NO: 527, including one or more post-translational modifications of that sequence. In a particular embodiment, the VL comprises one, two or three CDRs selected from: a. CDR-L1, comprising the amino acid sequence SEQ ID NO: 1069, b. CDR-L2, comprising the amino acid sequence SEQ ID NO: 1611, and c. CDR-L3, comprising the amino acid sequence SEQ ID NO: 2153.

[2884] In one aspect, an antibody or antigen-binding fragment thereof is provided, wherein the antibody or antigen-binding fragment thereof comprises a VH as in any of the embodiments provided above, and a VL as in any of the embodiments provided above. In some embodiments, the antibody or antigen-binding fragment thereof comprises the VH amino acid sequence of SEQ ID NO: 256, and the VL amino acid sequence of SEQ ID NO: 527, optionally including post-translational modifications of those sequences.

### TUCE1001

[2885] In one aspect, the present disclosure provides an antibody or antigen-binding fragment thereof comprising at least one or both variable regions selected from: a. VH comprising the amino acid sequence of SEQ ID NO: 257 and b. VL comprising the amino acid sequence of SEQ ID NO: 528.

[2886] In one aspect, the present disclosure provides an antibody or antigen-binding fragment thereof comprising at least one, two, three, four, five, or six CDRs selected from: a. CDR-H1 comprising the amino acid sequence of SEQ ID NO: 799, b. CDR-H2 comprising the amino acid sequence of SEQ ID NO: 1341, c. CDR-H3 comprising the amino acid sequence of SEQ ID NO: 1883, d. CDR-L1 comprising the amino acid sequence of SEQ ID NO: 1070, e. CDR-L2 comprising the amino acid sequence of SEQ ID NO: 1612, and f. CDR-L3 comprising the amino acid sequence of SEQ ID NO: 2154.

[2887] In one aspect, the present disclosure provides an antibody or antigen-binding fragment thereof comprising at least one, at least two, or all three VH CDR sequences selected from: a. CDR-H1 comprising the amino acid sequence of SEQ ID NO: 799, b. CDR-H2 comprising the amino acid sequence of SEQ ID NO: 1341, b. CDR-H3 comprising the amino acid sequence of SEQ ID NO: 1883, and a VL comprising the amino acid sequence of SEQ ID NO: 528.

[2888] In one aspect, the present disclosure provides an antibody or antigen-binding fragment thereof comprising at least one, at least two, or all three VL CDR sequences selected from: a. CDR-L1 comprising the amino acid sequence of SEQ ID NO: 1070, b. CDR-L2 comprising the amino acid sequence of SEQ ID NO: 1612, c. CDR-L3 comprising the amino acid sequence of SEQ ID NO: 2154, and a VH comprising the amino acid sequence of SEQ ID NO: 257.

[2889] In one aspect, an antibody or antigen-binding fragment thereof is provided, wherein the antibody or antigen-binding fragment thereof comprises a heavy chain variable domain (VH) having at least 90%, 91%, 92%, 93%, 94%, 95%, 96%, 97%, 98%, 99%, or 100% sequence identity to the amino acid sequence SEQ ID NO: 257. In some embodiments, a VH sequence having at least 90%, 91%, 92%, 93%, 94%, 95%, 96%, 97%, 98%, or 99% identity contains substitutions (e.g., conservative substitutions), insertions, or deletions relative to the reference sequence, but an antibody or antigen-binding fragment thereof comprising that sequence retains the ability to bind to same antigen as of the parent (e.g., cancer associated antigen). In some embodiments, a total of 1 to 10 amino acids have been substituted, inserted and/or deleted in the amino acid sequence SEQ ID NO: 257. In some embodiments, substitutions, insertions, or deletions occur in regions outside the CDRs (e.g., in the FRs). Optionally, the antibody or antigen-binding fragment thereof comprises the VH sequence SEQ ID NO: 257, including one or more post-translational modifications of that sequence. In a particular embodiment, the VH comprises one, two or three CDRs selected from: a. CDR-H1, comprising the amino acid sequence SEQ ID NO: 799, b. CDR-H2, comprising the amino acid sequence SEQ ID NO: 1341, and c. CDR-H3, comprising the amino acid sequence SEQ ID NO: 1883.

[2890] In one aspect, an antibody or antigen-binding fragment thereof is provided, wherein the antibody or antigen-binding fragment thereof comprises a light chain variable domain (VL) having at least 90%, 91%, 92%, 93%, 94%, 95%, 96%, 97%, 98%, 99%, or 100% sequence identity to the amino acid sequence SEQ ID NO: 528. In some embodiments, a VL sequence having at least 90%, 91%, 92%, 93%, 94%, 95%, 96%, 97%, 98%, or 99% identity contains substitutions (e.g., conservative substitutions), insertions, or deletions relative to the reference sequence, but an antibody or antigen-binding fragment thereof comprising that sequence retains the ability to bind to same antigen as the parent (e.g., cancer associated antigen). In some embodiments, a total of 1 to 10 amino acids have been substituted, inserted and/or deleted in the amino acid sequence SEQ ID NO: 528. In some embodiments, the substitutions, insertions, or deletions occur in regions outside the CDRs (e.g., in the FRs). Optionally, the antibody or antigen-binding fragment thereof comprises the VL sequence SEQ ID NO: 528, including one or more post-translational modifications of that sequence. In a particular embodiment, the VL comprises one, two or three CDRs selected from: a. CDR-L1, comprising the amino acid sequence SEQ ID NO: 1070, b. CDR-L2, comprising the amino acid sequence SEQ ID NO: 1612, and c. CDR-L3, comprising the amino acid sequence SEQ ID NO: 2154.

[2891] In one aspect, an antibody or antigen-binding fragment thereof is provided, wherein the antibody or antigen-binding fragment thereof comprises a VH as in any of the embodiments provided above, and a VL as in any of the embodiments provided above. In some embodiments, the antibody or antigen-binding fragment thereof comprises the VH amino acid sequence of SEQ ID NO: 257, and the VL amino acid sequence of SEQ ID NO: 528, optionally including post-translational modifications of those sequences.

### TUCE1002

[2892] In one aspect, the present disclosure provides an antibody or antigen-binding fragment thereof comprising at least one or both variable regions selected from: a. VH comprising the amino acid sequence of SEQ ID NO: 258 and b. VL comprising the amino acid sequence of SEQ ID NO: 529.

[2893] In one aspect, the present disclosure provides an antibody or antigen-binding fragment thereof comprising at least one, two, three, four, five, or six CDRs selected from: a. CDR-H1 comprising the amino acid sequence of SEQ ID NO: 800, b. CDR-H2 comprising the amino acid sequence of SEQ ID NO: 1342, c. CDR-H3 comprising the amino acid sequence of SEQ ID NO: 1884, d. CDR-L1 comprising the amino acid sequence of SEQ ID NO: 1071, e. CDR-L2 comprising the amino acid sequence of SEQ ID NO: 1613, and f. CDR-L3 comprising the amino acid sequence of SEQ ID NO: 2155.

[2894] In one aspect, the present disclosure provides an antibody or antigen-binding fragment thereof comprising a CDR-H3 comprising the amino acid sequence of SEQ ID NO: 1884, and a CDR-L3 comprising the amino acid sequence of SEQ ID NO: 2155.

[2895] In one aspect, the present disclosure provides an antibody or antigen-binding fragment thereof comprising at least one, at least two, or all three VH CDR sequences selected from: a. CDR-H1 comprising the amino acid sequence of SEQ ID NO: 800, b. CDR-H2 comprising the amino acid sequence of SEQ ID NO: 1342, c. CDR-H3 comprising the amino acid sequence of SEQ ID NO: 1884, and a VL comprising the amino acid sequence of SEQ ID NO: 529.

[2896] In one aspect, the present disclosure provides an antibody or antigen-binding fragment thereof comprising at least one, at least two, or all three VL CDR sequences selected from: a. CDR-L1 comprising the amino acid sequence of SEQ ID NO: 1071, b. CDR-L2 comprising the amino acid sequence of SEQ ID NO: 1613, c. CDR-L3 comprising the amino acid sequence of SEQ ID NO: 2155, and a VH comprising the amino acid sequence of SEQ ID NO: 258.

[2897] In one aspect, an antibody or antigen-binding fragment thereof is provided, wherein the antibody or antigen-binding fragment thereof comprises a heavy chain variable domain (VH) having at least 90%, 91%, 92%, 93%, 94%, 95%, 96%, 97%, 98%, 99%, or 100% sequence identity to the amino acid sequence SEQ ID NO: 258. In some embodiments, a VH sequence having at least 90%, 91%, 92%, 93%, 94%, 95%, 96%, 97%, 98%, or 99% identity contains substitutions (e.g., conservative substitutions), insertions, or deletions relative to the reference sequence, but an antibody or antigen-binding fragment thereof comprising that sequence retains the ability to bind to same antigen as of the parent (e.g., cancer associated antigen). In some embodiments, a total of 1 to 10 amino acids have been substituted, inserted and/or deleted in the amino acid sequence SEQ ID NO: 258. In some embodiments, substitutions, insertions, or deletions occur in regions outside the CDRs (e.g., in the FRs). Optionally, the antibody or antigen-binding fragment thereof comprises the VH sequence SEQ ID NO: 258, including one or more post-translational modifications of that sequence. In a particular embodiment, the VH comprises one, two or three CDRs selected from: a. CDR-H1, comprising the amino acid sequence SEQ ID NO: 800, b. CDR-H2, comprising the amino acid sequence SEQ ID NO: 1342, and c. CDR-H3, comprising the amino acid sequence SEQ ID NO: 1884.

[2898] In one aspect, an antibody or antigen-binding fragment thereof is provided, wherein the antibody or antigen-binding fragment thereof comprises a light chain variable domain (VL) having at least 90%, 91%, 92%, 93%, 94%, 95%, 96%, 97%, 98%, 99%, or 100% sequence identity to the amino acid sequence SEQ ID NO: 529. In some embodiments, a VL sequence having at least 90%, 91%, 92%, 93%, 94%, 95%, 96%, 97%, 98%, or 99% identity contains substitutions (e.g., conservative substitutions), insertions, or deletions relative to the reference sequence, but an antibody or antigen-binding fragment thereof comprising that sequence retains the ability to bind to same antigen as the parent (e.g., cancer associated antigen). In some embodiments, a total of 1 to 10 amino acids have been substituted, inserted and/or deleted in the amino acid sequence SEQ ID NO: 529. In some embodiments, the substitutions, insertions, or deletions occur in regions outside the CDRs (e.g., in the FRs). Optionally, the antibody or antigen-binding fragment thereof comprises the VL sequence SEQ ID NO: 529, including one or more post-translational modifications of that sequence. In a particular embodiment, the VL comprises one, two or three CDRs selected from: a. CDR-L1, comprising the amino acid sequence SEQ ID NO: 1071, b. CDR-L2, comprising the amino acid sequence SEQ ID NO: 1613, and c. CDR-L3, comprising the amino acid sequence SEQ ID NO: 2155.

[2899] In one aspect, an antibody or antigen-binding fragment thereof is provided, wherein the antibody or antigen-binding fragment thereof comprises a VH as in any of the embodiments provided above, and a VL as in any of the embodiments provided above. In some embodiments, the antibody or antigen-binding fragment thereof comprises the VH amino acid sequence of SEQ ID NO: 258, and the VL amino acid sequence of SEQ ID NO: 529, optionally including post-translational modifications of those sequences.

### TUCE1003

[2900] In one aspect, the present disclosure provides an antibody or antigen-binding fragment thereof comprising at least one or both variable regions selected from: a. VH comprising the amino acid sequence of SEQ ID NO: 259 and b. VL comprising the amino acid sequence of SEQ ID NO: 530.

[2901] In one aspect, the present disclosure provides an antibody or antigen-binding fragment thereof comprising at least one, two, three, four, five, or six CDRs selected from: a. CDR-H1 comprising the amino acid sequence of SEQ ID NO: 801, b. CDR-H2 comprising the amino acid sequence of SEQ ID NO: 1343, c. CDR-H3 comprising the amino acid sequence of SEQ ID NO: 1885, d. CDR-L1 comprising the amino acid sequence of SEQ ID NO: 1072, e. CDR-L2 comprising the amino acid sequence of SEQ ID NO: 1614, and f. CDR-L3 comprising the amino acid sequence of SEQ ID NO: 2156.

[2902] In one aspect, the present disclosure provides an antibody or antigen-binding fragment thereof comprising a CDR-H3 comprising the amino acid sequence of SEQ ID NO: 1885, and a CDR-L3 comprising the amino acid sequence of SEQ ID NO: 2156.

[2903] In one aspect, the present disclosure provides an antibody or antigen-binding fragment thereof comprising at least one, at least two, or all three VH CDR sequences selected from: a. CDR-H1 comprising the amino acid sequence of SEQ ID NO: 801, b. CDR-H2 comprising the amino acid sequence of SEQ ID NO: 1343, c. CDR-H3 comprising the amino acid sequence of SEQ ID NO: 1885, and a VL comprising the amino acid sequence of SEQ ID NO: 530.

[2904] In one aspect, the present disclosure provides an antibody or antigen-binding fragment thereof comprising at least one, at least two, or all three VL CDR sequences selected from: a. CDR-L1 comprising the amino acid sequence of SEQ ID NO: 1072, b. CDR-L2 comprising the amino acid sequence of SEQ ID NO: 1614, c. CDR-L3 comprising the amino acid sequence of SEQ ID NO: 2156, and a VH comprising the amino acid sequence of SEQ ID NO: 259.

[2905] In one aspect, an antibody or antigen-binding fragment thereof is provided, wherein the antibody or antigen-binding fragment thereof comprises a heavy chain variable domain (VH) having at least 90%, 91%, 92%, 93%, 94%, 95%, 96%, 97%, 98%, 99%, or 100% sequence identity to the amino acid sequence SEQ ID NO: 259. In some embodiments, a VH sequence having at least 90%, 91%, 92%, 93%, 94%, 95%, 96%, 97%, 98%, or 99% identity contains substitutions (e.g., conservative substitutions), insertions, or deletions relative to the reference sequence, but an antibody or antigen-binding fragment thereof comprising that sequence retains the ability to bind to same antigen as of the parent (e.g., cancer associated antigen). In some embodiments, a total of 1 to 10 amino acids have been substituted, inserted and/or deleted in the amino acid sequence SEQ ID NO: 259. In some embodiments, substitutions, insertions, or deletions occur in regions outside the CDRs (e.g., in the FRs). Optionally, the antibody or antigen-binding fragment thereof comprises the VH sequence SEQ ID NO: 259, including one or more post-translational modifications of that sequence. In a particular embodiment, the VH comprises one, two or three CDRs selected from: a. CDR-H1, comprising the amino acid sequence SEQ ID NO: 801, b. CDR-H2, comprising the amino acid sequence SEQ ID NO: 1343, and c. CDR-H3, comprising the amino acid sequence SEQ ID NO: 1885.

[2906] In one aspect, an antibody or antigen-binding fragment thereof is provided, wherein the antibody or antigen-binding fragment thereof comprises a light chain variable domain (VL) having at least 90%, 91%, 92%, 93%, 94%, 95%, 96%, 97%, 98%, 99%, or 100% sequence identity to the amino acid sequence SEQ ID NO: 530. In some embodiments, a VL sequence having at least 90%, 91%, 92%, 93%, 94%, 95%, 96%, 97%, 98%, or 99% identity contains substitutions (e.g., conservative substitutions), insertions, or deletions relative to the reference sequence, but an antibody or antigen-binding fragment thereof comprising that sequence retains the ability to bind to same antigen as the parent (e.g., cancer associated antigen). In some embodiments, a total of 1 to 10 amino acids have been substituted, inserted and/or deleted in the amino acid sequence SEQ ID NO: 530. In some embodiments, the substitutions, insertions, or deletions occur in regions outside the CDRs (e.g., in the FRs). Optionally, the antibody or antigen-binding fragment thereof comprises the VL sequence SEQ ID NO: 530, including one or more post-translational modifications of that sequence. In a particular embodiment, the VL comprises one, two or three CDRs selected from: a. CDR-L1, comprising the amino acid sequence SEQ ID NO: 1072, b. CDR-L2, comprising the amino acid sequence SEQ ID NO: 1614, and c. CDR-L3, comprising the amino acid sequence SEQ ID NO: 2156.

[2907] In one aspect, an antibody or antigen-binding fragment thereof is provided, wherein the antibody or antigen-binding fragment thereof comprises a VH as in any of the embodiments provided above, and a VL as in any of the embodiments provided above. In some embodiments, the antibody or antigen-binding fragment thereof comprises the VH amino acid sequence of SEQ ID NO: 259, and the VL amino acid sequence of SEQ ID NO: 530, optionally including post-translational modifications of those sequences.

### TUCE1004

[2908] In one aspect, the present disclosure provides an antibody or antigen-binding fragment thereof comprising at least one or both variable regions selected from: a. VH comprising the amino acid sequence of SEQ ID NO: 260 and b. VL comprising the amino acid sequence of SEQ ID NO: 531.

[2909] In one aspect, the present disclosure provides an antibody or antigen-binding fragment thereof comprising at least one, two, three, four, five, or six CDRs selected from: a. CDR-H1 comprising the amino acid sequence of SEQ ID NO: 802, b. CDR-H2 comprising the amino acid sequence of SEQ ID NO: 1344, c. CDR-H3 comprising the amino acid sequence of SEQ ID NO: 1886, d. CDR-L1 comprising the amino acid sequence of SEQ ID NO: 1073, e. CDR-L2 comprising the amino acid sequence of SEQ ID NO: 1615, and f. CDR-L3 comprising the amino acid sequence of SEQ ID NO: 2157.

[2910] In one aspect, the present disclosure provides an antibody or antigen-binding fragment thereof comprising a CDR-H3 comprising the amino acid sequence of SEQ ID NO: 1886, and a CDR-L3 comprising the amino acid sequence of SEQ ID NO: 2157.

[2911] In one aspect, the present disclosure provides an antibody or antigen-binding fragment thereof comprising at least one, at least two, or all three VH CDR sequences selected from: a. CDR-H1 comprising the amino acid sequence of SEQ ID NO: 802, b. CDR-H2 comprising the amino acid sequence of SEQ ID NO: 1344, c. CDR-H3 comprising the amino acid sequence of SEQ ID NO: 1886, and a VL comprising the amino acid sequence of SEQ ID NO: 531.

[2912] In one aspect, the present disclosure provides an antibody or antigen-binding fragment thereof comprising at least one, at least two, or all three VL CDR sequences selected from: a. CDR-L1 comprising the amino acid sequence of SEQ ID NO: 1073, b. CDR-L2 comprising the amino acid sequence of SEQ ID NO: 1615, c. CDR-L3 comprising the amino acid sequence of SEQ ID NO: 2157, and a VH comprising the amino acid sequence of SEQ ID NO: 260.

[2913] In one aspect, an antibody or antigen-binding fragment thereof is provided, wherein the antibody or antigen-binding fragment thereof comprises a heavy chain variable domain (VH) having at least 90%, 91%, 92%, 93%, 94%, 95%, 96%, 97%, 98%, 99%, or 100% sequence identity to the amino acid sequence SEQ ID NO: 260. In some embodiments, a VH sequence having at least 90%, 91%, 92%, 93%, 94%, 95%, 96%, 97%, 98%, or 99% identity contains substitutions (e.g., conservative substitutions), insertions, or deletions relative to the reference sequence, but an antibody or antigen-binding fragment thereof comprising that sequence retains the ability to bind to same antigen as of the parent (e.g., cancer associated antigen). In some embodiments, a total of 1 to 10 amino acids have been substituted, inserted and/or deleted in the amino acid sequence SEQ ID NO: 260. In some embodiments, substitutions, insertions, or deletions occur in regions outside the CDRs (e.g., in the FRs). Optionally, the antibody or antigen-binding fragment thereof comprises the VH sequence SEQ ID NO: 260, including one or more post-translational modifications of that sequence. In a particular embodiment, the VH comprises one, two or three CDRs selected from: a. CDR-H1, comprising the amino acid sequence SEQ ID NO: 802, b. CDR-H2, comprising the amino acid sequence SEQ ID NO: 1344, and c. CDR-H3, comprising the amino acid sequence SEQ ID NO: 1886.

[2914] In one aspect, an antibody or antigen-binding fragment thereof is provided, wherein the antibody or antigen-binding fragment thereof comprises a light chain variable domain (VL) having at least 90%, 91%, 92%, 93%, 94%, 95%, 96%, 97%, 98%, 99%, or 100% sequence identity to the amino acid sequence SEQ ID NO: 531. In some embodiments, a VL sequence having at least 90%, 91%, 92%, 93%, 94%, 95%, 96%, 97%, 98%, or 99% identity contains substitutions (e.g., conservative substitutions), insertions, or deletions relative to the reference sequence, but an antibody or antigen-binding fragment thereof comprising that sequence retains the ability to bind to same antigen as the parent (e.g., cancer associated antigen). In some embodiments, a total of 1 to 10 amino acids have been substituted, inserted and/or deleted in the amino acid sequence SEQ ID NO: 531. In some embodiments, the substitutions, insertions, or deletions occur in regions outside the CDRs (e.g., in the FRs). Optionally, the antibody or antigen-binding fragment thereof comprises the VL sequence SEQ ID NO: 531, including one or more post-translational modifications of that sequence. In a particular embodiment, the VL comprises one, two or three CDRs selected from: a. CDR-L1, comprising the amino acid sequence SEQ ID NO: 1073, b. CDR-L2, comprising the amino acid sequence SEQ ID NO: 1615, and c. CDR-L3, comprising the amino acid sequence SEQ ID NO: 2157.

[2915] In one aspect, an antibody or antigen-binding fragment thereof is provided, wherein the antibody or antigen-binding fragment thereof comprises a VH as in any of the embodiments provided above, and a VL as in any of the embodiments provided above. In some embodiments, the antibody or antigen-binding fragment thereof comprises the VH amino acid sequence of SEQ ID NO: 260, and the VL amino acid sequence of SEQ ID NO: 531, optionally including post-translational modifications of those sequences.

### TUCE1005

[2916] In one aspect, the present disclosure provides an antibody or antigen-binding fragment thereof comprising at least one or both variable regions selected from: a. VH comprising the amino acid sequence of SEQ ID NO: 261 and b. VL comprising the amino acid sequence of SEQ ID NO: 532.

[2917] In one aspect, the present disclosure provides an antibody or antigen-binding fragment thereof comprising at least one, two, three, four, five, or six CDRs selected from: a. CDR-H1 comprising the amino acid sequence of SEQ ID NO: 803, b. CDR-H2 comprising the amino acid sequence of SEQ ID NO: 1345, c. CDR-H3 comprising the amino acid sequence of SEQ ID NO: 1887, d. CDR-L1 comprising the amino acid sequence of SEQ ID NO: 1074, e. CDR-L2 comprising the amino acid sequence of SEQ ID NO: 1616, and f. CDR-L3 comprising the amino acid sequence of SEQ ID NO: 2158.

[2918] In one aspect, the present disclosure provides an antibody or antigen-binding fragment thereof comprising a CDR-H3 comprising the amino acid sequence of SEQ ID NO: 1887, and a CDR-L3 comprising the amino acid sequence of SEQ ID NO: 2158.

[2919] In one aspect, the present disclosure provides an antibody or antigen-binding fragment thereof comprising at least one, at least two, or all three VH CDR sequences selected from: a. CDR-H1 comprising the amino acid sequence of SEQ ID NO: 803, b. CDR-H2 comprising the amino acid sequence of SEQ ID NO: 1345, c. CDR-H3 comprising the amino acid sequence of SEQ ID NO: 1887, and a VL comprising the amino acid sequence of SEQ ID NO: 532.

[2920] In one aspect, the present disclosure provides an antibody or antigen-binding fragment thereof comprising at least one, at least two, or all three VL CDR sequences selected from: a. CDR-L1 comprising the amino acid sequence of SEQ ID NO: 1074, b. CDR-L2 comprising the amino acid sequence of SEQ ID NO: 1616, c. CDR-L3 comprising the amino acid sequence of SEQ ID NO: 2158, and a VH comprising the amino acid sequence of SEQ ID NO: 261.

[2921] In one aspect, an antibody or antigen-binding fragment thereof is provided, wherein the antibody or antigen-binding fragment thereof comprises a heavy chain variable domain (VH) having at least 90%, 91%, 92%, 93%, 94%, 95%, 96%, 97%, 98%, 99%, or 100% sequence identity to the amino acid sequence SEQ ID NO: 261. In some embodiments, a VH sequence having at least 90%, 91%, 92%, 93%, 94%, 95%, 96%, 97%, 98%, or 99% identity contains substitutions (e.g., conservative substitutions), insertions, or deletions relative to the reference sequence, but an antibody or antigen-binding fragment thereof comprising that sequence retains the ability to bind to same antigen as of the parent (e.g., cancer associated antigen). In some embodiments, a total of 1 to 10 amino acids have been substituted, inserted and/or deleted in the amino acid sequence SEQ ID NO: 261. In some embodiments, substitutions, insertions, or deletions occur in regions outside the CDRs (e.g., in the FRs). Optionally, the antibody or antigen-binding fragment thereof comprises the VH sequence SEQ ID NO: 261, including one or more post-translational modifications of that sequence. In a particular embodiment, the VH comprises one, two or three CDRs selected from: a. CDR-H1, comprising the amino acid sequence SEQ ID NO: 803, b. CDR-H2, comprising the amino acid sequence SEQ ID NO: 1345, and c. CDR-H3, comprising the amino acid sequence SEQ ID NO: 1887.

[2922] In one aspect, an antibody or antigen-binding fragment thereof is provided, wherein the antibody or antigen-binding fragment thereof comprises a light chain variable domain (VL) having at least 90%, 91%, 92%, 93%, 94%, 95%, 96%, 97%, 98%, 99%, or 100% sequence identity to the amino acid sequence SEQ ID NO: 532. In some embodiments, a VL sequence having at least 90%, 91%, 92%, 93%, 94%, 95%, 96%, 97%, 98%, or 99% identity contains substitutions (e.g., conservative substitutions), insertions, or deletions relative to the reference sequence, but an antibody or antigen-binding fragment thereof comprising that sequence retains the ability to bind to same antigen as the parent (e.g., cancer associated antigen). In some embodiments, a total of 1 to 10 amino acids have been substituted, inserted and/or deleted in the amino acid sequence SEQ ID NO: 532. In some embodiments, the substitutions, insertions, or deletions occur in regions outside the CDRs (e.g., in the FRs). Optionally, the antibody or antigen-binding fragment thereof comprises the VL sequence SEQ ID NO: 532, including one or more post-translational modifications of that sequence. In a particular embodiment, the VL comprises one, two or three CDRs selected from: a. CDR-L1, comprising the amino acid sequence SEQ ID NO: 1074, b. CDR-L2, comprising the amino acid sequence SEQ ID NO: 1616, and c. CDR-L3, comprising the amino acid sequence SEQ ID NO: 2158.

[2923] In one aspect, an antibody or antigen-binding fragment thereof is provided, wherein the antibody or antigen-binding fragment thereof comprises a VH as in any of the embodiments provided above, and a VL as in any of the embodiments provided above. In some embodiments, the antibody or antigen-binding fragment thereof comprises the VH amino acid sequence of SEQ ID NO: 261, and the VL amino acid sequence of SEQ ID NO: 532, optionally including post-translational modifications of those sequences.

### TUCE1006

[2924] In one aspect, the present disclosure provides an antibody or antigen-binding fragment thereof comprising at least one or both variable regions selected from: a. VH comprising the amino acid sequence of SEQ ID NO: 262 and b. VL comprising the amino acid sequence of SEQ ID NO: 533.

[2925] In one aspect, the present disclosure provides an antibody or antigen-binding fragment thereof comprising at least one, two, three, four, five, or six CDRs selected from: a. CDR-H1 comprising the amino acid sequence of SEQ ID NO: 804, b. CDR-H2 comprising the amino acid sequence of SEQ ID NO: 1346, c. CDR-H3 comprising the amino acid sequence of SEQ ID NO: 1888, d. CDR-L1 comprising the amino acid sequence of SEQ ID NO: 1075, e. CDR-L2 comprising the amino acid sequence of SEQ ID NO: 1617, and f. CDR-L3 comprising the amino acid sequence of SEQ ID NO: 2159.

[2926] In one aspect, the present disclosure provides an antibody or antigen-binding fragment thereof comprising a CDR-H3 comprising the amino acid sequence of SEQ ID NO: 1888, and a CDR-L3 comprising the amino acid sequence of SEQ ID NO: 2159.

[2927] In one aspect, the present disclosure provides an antibody or antigen-binding fragment thereof comprising at least one, at least two, or all three VH CDR sequences selected from: a. CDR-H1 comprising the amino acid sequence of SEQ ID NO: 804, b. CDR-H2 comprising the amino acid sequence of SEQ ID NO: 1346, c. CDR-H3 comprising the amino acid sequence of SEQ ID NO: 1888, and a VL comprising the amino acid sequence of SEQ ID NO: 533.

[2928] In one aspect, the present disclosure provides an antibody or antigen-binding fragment thereof comprising at least one, at least two, or all three VL CDR sequences selected from: a. CDR-L1 comprising the amino acid sequence of SEQ ID NO: 1075, b. CDR-L2 comprising the amino acid sequence of SEQ ID NO: 1617, c. CDR-L3 comprising the amino acid sequence of SEQ ID NO: 2159, and a VH comprising the amino acid sequence of SEQ ID NO: 262.

[2929] In one aspect, an antibody or antigen-binding fragment thereof is provided, wherein the antibody or antigen-binding fragment thereof comprises a heavy chain variable domain (VH) having at least 90%, 91%, 92%, 93%, 94%, 95%, 96%, 97%, 98%, 99%, or 100% sequence identity to the amino acid sequence SEQ ID NO: 262. In some embodiments, a VH sequence having at least 90%, 91%, 92%, 93%, 94%, 95%, 96%, 97%, 98%, or 99% identity contains substitutions (e.g., conservative substitutions), insertions, or deletions relative to the reference sequence, but an antibody or antigen-binding fragment thereof comprising that sequence retains the ability to bind to same antigen as of the parent (e.g., cancer associated antigen). In some embodiments, a total of 1 to 10 amino acids have been substituted, inserted and/or deleted in the amino acid sequence SEQ ID NO: 262. In some embodiments, substitutions, insertions, or deletions occur in regions outside the CDRs (e.g., in the FRs). Optionally, the antibody or antigen-binding fragment thereof comprises the VH sequence SEQ ID NO: 262, including one or more post-translational modifications of that sequence. In a particular embodiment, the VH comprises one, two or three CDRs selected from: a. CDR-H1, comprising the amino acid sequence SEQ ID NO: 804, b. CDR-H2, comprising the amino acid sequence SEQ ID NO: 1346, and c. CDR-H3, comprising the amino acid sequence SEQ ID NO: 1888.

[2930] In one aspect, an antibody or antigen-binding fragment thereof is provided, wherein the antibody or antigen-binding fragment thereof comprises a light chain variable domain (VL) having at least 90%, 91%, 92%, 93%, 94%, 95%, 96%, 97%, 98%, 99%, or 100% sequence identity to the amino acid sequence SEQ ID NO: 533. In some embodiments, a VL sequence having at least 90%, 91%, 92%, 93%, 94%, 95%, 96%, 97%, 98%, or 99% identity contains substitutions (e.g., conservative substitutions), insertions, or deletions relative to the reference sequence, but an antibody or antigen-binding fragment thereof comprising that sequence retains the ability to bind to same antigen as the parent (e.g., cancer associated antigen). In some embodiments, a total of 1 to 10 amino acids have been substituted, inserted and/or deleted in the amino acid sequence SEQ ID NO: 533. In some embodiments, the substitutions, insertions, or deletions occur in regions outside the CDRs (e.g., in the FRs). Optionally, the antibody or antigen-binding fragment thereof comprises the VL sequence SEQ ID NO: 533, including one or more post-translational modifications of that sequence. In a particular embodiment, the VL comprises one, two or three CDRs selected from: a. CDR-L1, comprising the amino acid sequence SEQ ID NO: 1075, b. CDR-L2, comprising the amino acid sequence SEQ ID NO: 1617, and c. CDR-L3, comprising the amino acid sequence SEQ ID NO: 2159.

[2931] In one aspect, an antibody or antigen-binding fragment thereof is provided, wherein the antibody or antigen-binding fragment thereof comprises a VH as in any of the embodiments provided above, and a VL as in any of the embodiments provided above. In some embodiments, the antibody or antigen-binding fragment thereof comprises the VH amino acid sequence of SEQ ID NO: 262, and the VL amino acid sequence of SEQ ID NO: 533, optionally including post-translational modifications of those sequences.

### TUCE1007

[2932] In one aspect, the present disclosure provides an antibody or antigen-binding fragment thereof comprising at least one or both variable regions selected from: a. VH comprising the amino acid sequence of SEQ ID NO: 263 and b. VL comprising the amino acid sequence of SEQ ID NO: 534.

[2933] In one aspect, the present disclosure provides an antibody or antigen-binding fragment thereof comprising at least one, two, three, four, five, or six CDRs selected from: a. CDR-H1 comprising the amino acid sequence of SEQ ID NO: 805, b. CDR-H2 comprising the amino acid sequence of SEQ ID NO: 1347, c. CDR-H3 comprising the amino acid sequence of SEQ ID NO: 1889, d. CDR-L1 comprising the amino acid sequence of SEQ ID NO: 1076, e. CDR-L2 comprising the amino acid sequence of SEQ ID NO: 1618, f. CDR-L3 comprising the amino acid sequence of SEQ ID NO: 2160.

[2934] In one aspect, the present disclosure provides an antibody or antigen-binding fragment thereof comprising a CDR-H3 comprising the amino acid sequence of SEQ ID NO: 1889, and a CDR-L3 comprising the amino acid sequence of SEQ ID NO: 2160.

[2935] In one aspect, the present disclosure provides an antibody or antigen-binding fragment thereof comprising at least one, at least two, or all three VH CDR sequences selected from: a. CDR-H1 comprising the amino acid sequence of SEQ ID NO: 805, b. CDR-H2 comprising the amino acid sequence of SEQ ID NO: 1347, c. CDR-H3 comprising the amino acid sequence of SEQ ID NO: 1889, and a VL comprising the amino acid sequence of SEQ ID NO: 534.

[2936] In one aspect, the present disclosure provides an antibody or antigen-binding fragment thereof comprising at least one, at least two, or all three VL CDR sequences selected from: a. CDR-L1 comprising the amino acid sequence of SEQ ID NO: 1076, b. CDR-L2 comprising the amino acid sequence of SEQ ID NO: 1618, c. CDR-L3 comprising the amino acid sequence of SEQ ID NO: 2160, and a VH comprising the amino acid sequence of SEQ ID NO: 263.

[2937] In one aspect, an antibody or antigen-binding fragment thereof is provided, wherein the antibody or antigen-binding fragment thereof comprises a heavy chain variable domain (VH) having at least 90%, 91%, 92%, 93%, 94%, 95%, 96%, 97%, 98%, 99%, or 100% sequence identity to the amino acid sequence SEQ ID NO: 263. In some embodiments, a VH sequence having at least 90%, 91%, 92%, 93%, 94%, 95%, 96%, 97%, 98%, or 99% identity contains substitutions (e.g., conservative substitutions), insertions, or deletions relative to the reference sequence, but an antibody or antigen-binding fragment thereof comprising that sequence retains the ability to bind to same antigen as of the parent (e.g., cancer associated antigen). In some embodiments, a total of 1 to 10 amino acids have been substituted, inserted and/or deleted in the amino acid sequence SEQ ID NO: 263. In some embodiments, substitutions, insertions, or deletions occur in regions outside the CDRs (e.g., in the FRs). Optionally, the antibody or antigen-binding fragment thereof comprises the VH sequence SEQ ID NO: 263, including one or more post-translational modifications of that sequence. In a particular embodiment, the VH comprises one, two or three CDRs selected from: a. CDR-H1, comprising the amino acid sequence SEQ ID NO: 805, b. CDR-H2, comprising the amino acid sequence SEQ ID NO: 1347, and c. CDR-H3, comprising the amino acid sequence SEQ ID NO: 1889.

[2938] In one aspect, an antibody or antigen-binding fragment thereof is provided, wherein the antibody or antigen-binding fragment thereof comprises a light chain variable domain (VL) having at least 90%, 91%, 92%, 93%, 94%, 95%, 96%, 97%, 98%, 99%, or 100% sequence identity to the amino acid sequence SEQ ID NO: 534. In some embodiments, a VL sequence having at least 90%, 91%, 92%, 93%, 94%, 95%, 96%, 97%, 98%, or 99% identity contains substitutions (e.g., conservative substitutions), insertions, or deletions relative to the reference sequence, but an antibody or antigen-binding fragment thereof comprising that sequence retains the ability to bind to same antigen as the parent (e.g., cancer associated antigen). In some embodiments, a total of 1 to 10 amino acids have been substituted, inserted and/or deleted in the amino acid sequence SEQ ID NO: 534. In some embodiments, the substitutions, insertions, or deletions occur in regions outside the CDRs (e.g., in the FRs). Optionally, the antibody or antigen-binding fragment thereof comprises the VL sequence SEQ ID NO: 534, including one or more post-translational modifications of that sequence. In a particular embodiment, the VL comprises one, two or three CDRs selected from: a. CDR-L1, comprising the amino acid sequence SEQ ID NO: 1076, b. CDR-L2, comprising the amino acid sequence SEQ ID NO: 1618, and c. CDR-L3, comprising the amino acid sequence SEQ ID NO: 2160.

[2939] In one aspect, an antibody or antigen-binding fragment thereof is provided, wherein the antibody or antigen-binding fragment thereof comprises a VH as in any of the embodiments provided above, and a VL as in any of the embodiments provided above. In some embodiments, the antibody or antigen-binding fragment thereof comprises the VH amino acid sequence of SEQ ID NO: 263, and the VL amino acid sequence of SEQ ID NO: 534, optionally including post-translational modifications of those sequences.

### TUCE1008

[2940] In one aspect, the present disclosure provides an antibody or antigen-binding fragment thereof comprising at least one or both variable regions selected from: a. VH comprising the amino acid sequence of SEQ ID NO: 264 and b. VL comprising the amino acid sequence of SEQ ID NO: 535.

[2941] In one aspect, the present disclosure provides an antibody or antigen-binding fragment thereof comprising at least one, two, three, four, five, or six CDRs selected from: a. CDR-H1 comprising the amino acid sequence of SEQ ID NO: 806, b. CDR-H2 comprising the amino acid sequence of SEQ ID NO: 1348, c. CDR-H3 comprising the amino acid sequence of SEQ ID NO: 1890, d. CDR-L1 comprising the amino acid sequence of SEQ ID NO: 1077, e. CDR-L2 comprising the amino acid sequence of SEQ ID NO: 1619, and f. CDR-L3 comprising the amino acid sequence of SEQ ID NO: 2161.

[2942] In one aspect, the present disclosure provides an antibody or antigen-binding fragment thereof comprising a CDR-H3 comprising the amino acid sequence of SEQ ID NO: 1890, and a CDR-L3 comprising the amino acid sequence of SEQ ID NO: 2161.

[2943] In one aspect, the present disclosure provides an antibody or antigen-binding fragment thereof comprising at least one, at least two, or all three VH CDR sequences selected from: a. CDR-H1 comprising the amino acid sequence of SEQ ID NO: 806, b. CDR-H2 comprising the amino acid sequence of SEQ ID NO: 1348, c. CDR-H3 comprising the amino acid sequence of SEQ ID NO: 1890, and a VL comprising the amino acid sequence of SEQ ID NO: 535.

[2944] In one aspect, the present disclosure provides an antibody or antigen-binding fragment thereof comprising at least one, at least two, or all three VL CDR sequences selected from: a. CDR-L1 comprising the amino acid sequence of SEQ ID NO: 1077, b. CDR-L2 comprising the amino acid sequence of SEQ ID NO: 1619, c. CDR-L3 comprising the amino acid sequence of SEQ ID NO: 2161, and a VH comprising the amino acid sequence of SEQ ID NO: 264.

[2945] In one aspect, an antibody or antigen-binding fragment thereof is provided, wherein the antibody or antigen-binding fragment thereof comprises a heavy chain variable domain (VH) having at least 90%, 91%, 92%, 93%, 94%, 95%, 96%, 97%, 98%, 99%, or 100% sequence identity to the amino acid sequence SEQ ID NO: 264. In some embodiments, a VH sequence having at least 90%, 91%, 92%, 93%, 94%, 95%, 96%, 97%, 98%, or 99% identity contains substitutions (e.g., conservative substitutions), insertions, or deletions relative to the reference sequence, but an antibody or antigen-binding fragment thereof comprising that sequence retains the ability to bind to same antigen as of the parent (e.g., cancer associated antigen). In some embodiments, a total of 1 to 10 amino acids have been substituted, inserted and/or deleted in the amino acid sequence SEQ ID NO: 264. In some embodiments, substitutions, insertions, or deletions occur in regions outside the CDRs (e.g., in the FRs). Optionally, the antibody or antigen-binding fragment thereof comprises the VH sequence SEQ ID NO: 264, including one or more post-translational modifications of that sequence. In a particular embodiment, the VH comprises one, two or three CDRs selected from: a. CDR-H1, comprising the amino acid sequence SEQ ID NO: 806, b. CDR-H2, comprising the amino acid sequence SEQ ID NO: 1348, and c. CDR-H3, comprising the amino acid sequence SEQ ID NO: 1890.

[2946] In one aspect, an antibody or antigen-binding fragment thereof is provided, wherein the antibody or antigen-binding fragment thereof comprises a light chain variable domain (VL) having at least 90%, 91%, 92%, 93%, 94%, 95%, 96%, 97%, 98%, 99%, or 100% sequence identity to the amino acid sequence SEQ ID NO: 535. In some embodiments, a VL sequence having at least 90%, 91%, 92%, 93%, 94%, 95%, 96%, 97%, 98%, or 99% identity contains substitutions (e.g., conservative substitutions), insertions, or deletions relative to the reference sequence, but an antibody or antigen-binding fragment thereof comprising that sequence retains the ability to bind to same antigen as the parent (e.g., cancer associated antigen). In some embodiments, a total of 1 to 10 amino acids have been substituted, inserted and/or deleted in the amino acid sequence SEQ ID NO: 535. In some embodiments, the substitutions, insertions, or deletions occur in regions outside the CDRs (e.g., in the FRs). Optionally, the antibody or antigen-binding fragment thereof comprises the VL sequence SEQ ID NO: 535, including one or more post-translational modifications of that sequence. In a particular embodiment, the VL comprises one, two or three CDRs selected from: a. CDR-L1, comprising the amino acid sequence SEQ ID NO: 1077, b. CDR-L2, comprising the amino acid sequence SEQ ID NO: 1619, and c. CDR-L3, comprising the amino acid sequence SEQ ID NO: 2161.

[2947] In one aspect, an antibody or antigen-binding fragment thereof is provided, wherein the antibody or antigen-binding fragment thereof comprises a VH as in any of the embodiments provided above, and a VL as in any of the embodiments provided above. In some embodiments, the antibody or antigen-binding fragment thereof comprises the VH amino acid sequence of SEQ ID NO: 264, and the VL amino acid sequence of SEQ ID NO: 535, optionally including post-translational modifications of those sequences.

### TUCE1009

[2948] In one aspect, the present disclosure provides an antibody or antigen-binding fragment thereof comprising at least one or both variable regions selected from: a. VH comprising the amino acid sequence of SEQ ID NO: 265 and b. VL comprising the amino acid sequence of SEQ ID NO: 536.

[2949] In one aspect, the present disclosure provides an antibody or antigen-binding fragment thereof comprising at least one, two, three, four, five, or six CDRs selected from: a. CDR-H1 comprising the amino acid sequence of SEQ ID NO: 807, b. CDR-H2 comprising the amino acid sequence of SEQ ID NO: 1349, c. CDR-H3 comprising the amino acid sequence of SEQ ID NO: 1891, d. CDR-L1 comprising the amino acid sequence of SEQ ID NO: 1078, e. CDR-L2 comprising the amino acid sequence of SEQ ID NO: 1620, and f. CDR-L3 comprising the amino acid sequence of SEQ ID NO: 2162.

[2950] In one aspect, the present disclosure provides an antibody or antigen-binding fragment thereof comprising a CDR-H3 comprising the amino acid sequence of SEQ ID NO: 1891, and a CDR-L3 comprising the amino acid sequence of SEQ ID NO: 2162.

[2951] In one aspect, the present disclosure provides an antibody or antigen-binding fragment thereof comprising at least one, at least two, or all three VH CDR sequences selected from: a. CDR-H1 comprising the amino acid sequence of SEQ ID NO: 807, b. CDR-H2 comprising the amino acid sequence of SEQ ID NO: 1349, c. CDR-H3 comprising the amino acid sequence of SEQ ID NO: 1891, and a VL comprising the amino acid sequence of SEQ ID NO: 536.

[2952] In one aspect, the present disclosure provides an antibody or antigen-binding fragment thereof comprising at least one, at least two, or all three VL CDR sequences selected from: a. CDR-L1 comprising the amino acid sequence of SEQ ID NO: 1078, b. CDR-L2 comprising the amino acid sequence of SEQ ID NO: 1620, c. CDR-L3 comprising the amino acid sequence of SEQ ID NO: 2162, and a VH comprising the amino acid sequence of SEQ ID NO: 265.

[2953] In one aspect, an antibody or antigen-binding fragment thereof is provided, wherein the antibody or antigen-binding fragment thereof comprises a heavy chain variable domain (VH) having at least 90%, 91%, 92%, 93%, 94%, 95%, 96%, 97%, 98%, 99%, or 100% sequence identity to the amino acid sequence SEQ ID NO: 265. In some embodiments, a VH sequence having at least 90%, 91%, 92%, 93%, 94%, 95%, 96%, 97%, 98%, or 99% identity contains substitutions (e.g., conservative substitutions), insertions, or deletions relative to the reference sequence, but an antibody or antigen-binding fragment thereof comprising that sequence retains the ability to bind to same antigen as of the parent (e.g., cancer associated antigen). In some embodiments, a total of 1 to 10 amino acids have been substituted, inserted and/or deleted in the amino acid sequence SEQ ID NO: 265. In some embodiments, substitutions, insertions, or deletions occur in regions outside the CDRs (e.g., in the FRs). Optionally, the antibody or antigen-binding fragment thereof comprises the VH sequence SEQ ID NO: 265, including one or more post-translational modifications of that sequence. In a particular embodiment, the VH comprises one, two or three CDRs selected from: a. CDR-H1, comprising the amino acid sequence SEQ ID NO: 807, b. CDR-H2, comprising the amino acid sequence SEQ ID NO: 1349, and c. CDR-H3, comprising the amino acid sequence SEQ ID NO: 1891.

[2954] In one aspect, an antibody or antigen-binding fragment thereof is provided, wherein the antibody or antigen-binding fragment thereof comprises a light chain variable domain (VL) having at least 90%, 91%, 92%, 93%, 94%, 95%, 96%, 97%, 98%, 99%, or 100% sequence identity to the amino acid sequence SEQ ID NO: 536. In some embodiments, a VL sequence having at least 90%, 91%, 92%, 93%, 94%, 95%, 96%, 97%, 98%, or 99% identity contains substitutions (e.g., conservative substitutions), insertions, or deletions relative to the reference sequence, but an antibody or antigen-binding fragment thereof comprising that sequence retains the ability to bind to same antigen as the parent (e.g., cancer associated antigen). In some embodiments, a total of 1 to 10 amino acids have been substituted, inserted and/or deleted in the amino acid sequence SEQ ID NO: 536. In some embodiments, the substitutions, insertions, or deletions occur in regions outside the CDRs (e.g., in the FRs). Optionally, the antibody or antigen-binding fragment thereof comprises the VL sequence SEQ ID NO: 536, including one or more post-translational modifications of that sequence. In a particular embodiment, the VL comprises one, two or three CDRs selected from: a. CDR-L1, comprising the amino acid sequence SEQ ID NO: 1078, b. CDR-L2, comprising the amino acid sequence SEQ ID NO: 1620, and c. CDR-L3, comprising the amino acid sequence SEQ ID NO: 2162.

[2955] In one aspect, an antibody or antigen-binding fragment thereof is provided, wherein the antibody or antigen-binding fragment thereof comprises a VH as in any of the embodiments provided above, and a VL as in any of the embodiments provided above. In some embodiments, the antibody or antigen-binding fragment thereof comprises the VH amino acid sequence of SEQ ID NO: 265, and the VL amino acid sequence of SEQ ID NO: 536, optionally including post-translational modifications of those sequences.

### TUCE1010

[2956] In one aspect, the present disclosure provides an antibody or antigen-binding fragment thereof comprising at least one or both variable regions selected from: a. VH comprising the amino acid sequence of SEQ ID NO: 266 and b. VL comprising the amino acid sequence of SEQ ID NO: 537.

[2957] In one aspect, the present disclosure provides an antibody or antigen-binding fragment thereof comprising at least one, two, three, four, five, or six CDRs selected from: a. CDR-H1 comprising the amino acid sequence of SEQ ID NO: 808, b. CDR-H2 comprising the amino acid sequence of SEQ ID NO: 1350, c. CDR-H3 comprising the amino acid sequence of SEQ ID NO: 1892, d. CDR-L1 comprising the amino acid sequence of SEQ ID NO: 1079, e. CDR-L2 comprising the amino acid sequence of SEQ ID NO: 1621, and f. CDR-L3 comprising the amino acid sequence of SEQ ID NO: 2163.

[2958] In one aspect, the present disclosure provides an antibody or antigen-binding fragment thereof comprising a CDR-H3 comprising the amino acid sequence of SEQ ID NO: 1892, and a CDR-L3 comprising the amino acid sequence of SEQ ID NO: 2163.

[2959] In one aspect, the present disclosure provides an antibody or antigen-binding fragment thereof comprising at least one, at least two, or all three VH CDR sequences selected from: a. CDR-H1 comprising the amino acid sequence of SEQ ID NO: 808, b. CDR-H2 comprising the amino acid sequence of SEQ ID NO: 1350, c. CDR-H3 comprising the amino acid sequence of SEQ ID NO: 1892, and a VL comprising the amino acid sequence of SEQ ID NO: 537.

[2960] In one aspect, the present disclosure provides an antibody or antigen-binding fragment thereof comprising at least one, at least two, or all three VL CDR sequences selected from: a. CDR-L1 comprising the amino acid sequence of SEQ ID NO: 1079, b. CDR-L2 comprising the amino acid sequence of SEQ ID NO: 1621, c. CDR-L3 comprising the amino acid sequence of SEQ ID NO: 2163, and a VH comprising the amino acid sequence of SEQ ID NO: 266.

[2961] In one aspect, an antibody or antigen-binding fragment thereof is provided, wherein the antibody or antigen-binding fragment thereof comprises a heavy chain variable domain (VH) having at least 90%, 91%, 92%, 93%, 94%, 95%, 96%, 97%, 98%, 99%, or 100% sequence identity to the amino acid sequence SEQ ID NO: 266. In some embodiments, a VH sequence having at least 90%, 91%, 92%, 93%, 94%, 95%, 96%, 97%, 98%, or 99% identity contains substitutions (e.g., conservative substitutions), insertions, or deletions relative to the reference sequence, but an antibody or antigen-binding fragment thereof comprising that sequence retains the ability to bind to same antigen as of the parent (e.g., cancer associated antigen). In some embodiments, a total of 1 to 10 amino acids have been substituted, inserted and/or deleted in the amino acid sequence SEQ ID NO: 266. In some embodiments, substitutions, insertions, or deletions occur in regions outside the CDRs (e.g., in the FRs). Optionally, the antibody or antigen-binding fragment thereof comprises the VH sequence SEQ ID NO: 266, including one or more post-translational modifications of that sequence. In a particular embodiment, the VH comprises one, two or three CDRs selected from: a. CDR-H1, comprising the amino acid sequence SEQ ID NO: 808, b. CDR-H2, comprising the amino acid sequence SEQ ID NO: 1350, and c. CDR-H3, comprising the amino acid sequence SEQ ID NO: 1892.

[2962] In one aspect, an antibody or antigen-binding fragment thereof is provided, wherein the antibody or antigen-binding fragment thereof comprises a light chain variable domain (VL) having at least 90%, 91%, 92%, 93%, 94%, 95%, 96%, 97%, 98%, 99%, or 100% sequence identity to the amino acid sequence SEQ ID NO: 537. In some embodiments, a VL sequence having at least 90%, 91%, 92%, 93%, 94%, 95%, 96%, 97%, 98%, or 99% identity contains substitutions (e.g., conservative substitutions), insertions, or deletions relative to the reference sequence, but an antibody or antigen-binding fragment thereof comprising that sequence retains the ability to bind to same antigen as the parent (e.g., cancer associated antigen). In some embodiments, a total of 1 to 10 amino acids have been substituted, inserted and/or deleted in the amino acid sequence SEQ ID NO: 537. In some embodiments, the substitutions, insertions, or deletions occur in regions outside the CDRs (e.g., in the FRs). Optionally, the antibody or antigen-binding fragment thereof comprises the VL sequence SEQ ID NO: 537, including one or more post-translational modifications of that sequence. In a particular embodiment, the VL comprises one, two or three CDRs selected from: a. CDR-L1, comprising the amino acid sequence SEQ ID NO: 1079, b. CDR-L2, comprising the amino acid sequence SEQ ID NO: 1621, and c. CDR-L3, comprising the amino acid sequence SEQ ID NO: 2163.

[2963] In one aspect, an antibody or antigen-binding fragment thereof is provided, wherein the antibody or antigen-binding fragment thereof comprises a VH as in any of the embodiments provided above, and a VL as in any of the embodiments provided above. In some embodiments, the antibody or antigen-binding fragment thereof comprises the VH amino acid sequence of SEQ ID NO: 266, and the VL amino acid sequence of SEQ ID NO: 537, optionally including post-translational modifications of those sequences.

### TUCS1001

[2964] In one aspect, the present disclosure provides an antibody or antigen-binding fragment thereof comprising at least one or both variable regions selected from: a. VH comprising the amino acid sequence of SEQ ID NO: 267 and b. VL comprising the amino acid sequence of SEQ ID NO: 538.

[2965] In one aspect, the present disclosure provides an antibody or antigen-binding fragment thereof comprising at least one, two, three, four, five, or six CDRs selected from: a. CDR-H1 comprising the amino acid sequence of SEQ ID NO: 809, b. CDR-H2 comprising the amino acid sequence of SEQ ID NO: 1351, c. CDR-H3 comprising the amino acid sequence of SEQ ID NO: 1893, d. CDR-L1 comprising the amino acid sequence of SEQ ID NO: 1080, e. CDR-L2 comprising the amino acid sequence of SEQ ID NO: 1622, and f. CDR-L3 comprising the amino acid sequence of SEQ ID NO: 2164.

[2966] In one aspect, the present disclosure provides an antibody or antigen-binding fragment thereof comprising a CDR-H3 comprising the amino acid sequence of SEQ ID NO: 1893, and a CDR-L3 comprising the amino acid sequence of SEQ ID NO: 2164.

[2967] In one aspect, the present disclosure provides an antibody or antigen-binding fragment thereof comprising at least one, at least two, or all three VH CDR sequences selected from: a. CDR-H1 comprising the amino acid sequence of SEQ ID NO: 809, b. CDR-H2 comprising the amino acid sequence of SEQ ID NO: 1351, c. CDR-H3 comprising the amino acid sequence of SEQ ID NO: 1893, and a VL comprising the amino acid sequence of SEQ ID NO: 538.

[2968] In one aspect, the present disclosure provides an antibody or antigen-binding fragment thereof comprising at least one, at least two, or all three VL CDR sequences selected from: a. CDR-L1 comprising the amino acid sequence of SEQ ID NO: 1080, b. CDR-L2 comprising the amino acid sequence of SEQ ID NO: 1622, c. CDR-L3 comprising the amino acid sequence of SEQ ID NO: 2164, and a VH comprising the amino acid sequence of SEQ ID NO: 267.

[2969] In one aspect, an antibody or antigen-binding fragment thereof is provided, wherein the antibody or antigen-binding fragment thereof comprises a heavy chain variable domain (VH) having at least 90%, 91%, 92%, 93%, 94%, 95%, 96%, 97%, 98%, 99%, or 100% sequence identity to the amino acid sequence SEQ ID NO: 267. In some embodiments, a VH sequence having at least 90%, 91%, 92%, 93%, 94%, 95%, 96%, 97%, 98%, or 99% identity contains substitutions (e.g., conservative substitutions), insertions, or deletions relative to the reference sequence, but an antibody or antigen-binding fragment thereof comprising that sequence retains the ability to bind to same antigen as of the parent (e.g., cancer associated antigen). In some embodiments, a total of 1 to 10 amino acids have been substituted, inserted and/or deleted in the amino acid sequence SEQ ID NO: 267. In some embodiments, substitutions, insertions, or deletions occur in regions outside the CDRs (e.g., in the FRs). Optionally, the antibody or antigen-binding fragment thereof comprises the VH sequence SEQ ID NO: 267, including one or more post-translational modifications of that sequence. In a particular embodiment, the VH comprises one, two or three CDRs selected from: a. CDR-H1, comprising the amino acid sequence SEQ ID NO: 809, b. CDR-H2, comprising the amino acid sequence SEQ ID NO: 1351, and c. CDR-H3, comprising the amino acid sequence SEQ ID NO: 1893.

[2970] In one aspect, an antibody or antigen-binding fragment thereof is provided, wherein the antibody or antigen-binding fragment thereof comprises a light chain variable domain (VL) having at least 90%, 91%, 92%, 93%, 94%, 95%, 96%, 97%, 98%, 99%, or 100% sequence identity to the amino acid sequence SEQ ID NO: 538. In some embodiments, a VL sequence having at least 90%, 91%, 92%, 93%, 94%, 95%, 96%, 97%, 98%, or 99% identity contains substitutions (e.g., conservative substitutions), insertions, or deletions relative to the reference sequence, but an antibody or antigen-binding fragment thereof comprising that sequence retains the ability to bind to same antigen as the parent (e.g., cancer associated antigen). In some embodiments, a total of 1 to 10 amino acids have been substituted, inserted and/or deleted in the amino acid sequence SEQ ID NO: 538. In some embodiments, the substitutions, insertions, or deletions occur in regions outside the CDRs (e.g., in the FRs). Optionally, the antibody or antigen-binding fragment thereof comprises the VL sequence SEQ ID NO: 538, including one or more post-translational modifications of that sequence. In a particular embodiment, the VL comprises one, two or three CDRs selected from: a. CDR-L1, comprising the amino acid sequence SEQ ID NO: 1080, b. CDR-L2, comprising the amino acid sequence SEQ ID NO: 1622, and c. CDR-L3, comprising the amino acid sequence SEQ ID NO: 2164.

[2971] In one aspect, an antibody or antigen-binding fragment thereof is provided, wherein the antibody or antigen-binding fragment thereof comprises a VH as in any of the embodiments provided above, and a VL as in any of the embodiments provided above. In some embodiments, the antibody or antigen-binding fragment thereof comprises the VH amino acid sequence of SEQ ID NO: 267, and the VL amino acid sequence of SEQ ID NO: 538, optionally including post-translational modifications of those sequences.

### TUCS1002

[2972] In one aspect, the present disclosure provides an antibody or antigen-binding fragment thereof comprising at least one or both variable regions selected from: a. VH comprising the amino acid sequence of SEQ ID NO: 268 and b. VL comprising the amino acid sequence of SEQ ID NO: 539.

[2973] In one aspect, the present disclosure provides an antibody or antigen-binding fragment thereof comprising at least one, two, three, four, five, or six CDRs selected from: a. CDR-H1 comprising the amino acid sequence of SEQ ID NO: 810, b. CDR-H2 comprising the amino acid sequence of SEQ ID NO: 1352, c. CDR-H3 comprising the amino acid sequence of SEQ ID NO: 1894, d. CDR-L1 comprising the amino acid sequence of SEQ ID NO: 1081, e. CDR-L2 comprising the amino acid sequence of SEQ ID NO: 1623, and f. CDR-L3 comprising the amino acid sequence of SEQ ID NO: 2165.

[2974] In one aspect, the present disclosure provides an antibody or antigen-binding fragment thereof comprising a CDR-H3 comprising the amino acid sequence of SEQ ID NO: 1894, and a CDR-L3 comprising the amino acid sequence of SEQ ID NO: 2165.

[2975] In one aspect, the present disclosure provides an antibody or antigen-binding fragment thereof comprising at least one, at least two, or all three VH CDR sequences selected from: a. CDR-H1 comprising the amino acid sequence of SEQ ID NO: 810, b. CDR-H2 comprising the amino acid sequence of SEQ ID NO: 1352, c. CDR-H3 comprising the amino acid sequence of SEQ ID NO: 1894, and a VL comprising the amino acid sequence of SEQ ID NO: 539.

[2976] In one aspect, the present disclosure provides an antibody or antigen-binding fragment thereof comprising at least one, at least two, or all three VL CDR sequences selected from: a. CDR-L1 comprising the amino acid sequence of SEQ ID NO: 1081, b. CDR-L2 comprising the amino acid sequence of SEQ ID NO: 1623, c. CDR-L3 comprising the amino acid sequence of SEQ ID NO: 2165, and a VH comprising the amino acid sequence of SEQ ID NO: 268.

[2977] In one aspect, an antibody or antigen-binding fragment thereof is provided, wherein the antibody or antigen-binding fragment thereof comprises a heavy chain variable domain (VH) having at least 90%, 91%, 92%, 93%, 94%, 95%, 96%, 97%, 98%, 99%, or 100% sequence identity to the amino acid sequence SEQ ID NO: 268. In some embodiments, a VH sequence having at least 90%, 91%, 92%, 93%, 94%, 95%, 96%, 97%, 98%, or 99% identity contains substitutions (e.g., conservative substitutions), insertions, or deletions relative to the reference sequence, but an antibody or antigen-binding fragment thereof comprising that sequence retains the ability to bind to same antigen as of the parent (e.g., cancer associated antigen). In some embodiments, a total of 1 to 10 amino acids have been substituted, inserted and/or deleted in the amino acid sequence SEQ ID NO: 268. In some embodiments, substitutions, insertions, or deletions occur in regions outside the CDRs (e.g., in the FRs). Optionally, the antibody or antigen-binding fragment thereof comprises the VH sequence SEQ ID NO: 268, including one or more post-translational modifications of that sequence. In a particular embodiment, the VH comprises one, two or three CDRs selected from: a. CDR-H1, comprising the amino acid sequence SEQ ID NO: 810, b. CDR-H2, comprising the amino acid sequence SEQ ID NO: 1352, and c. CDR-H3, comprising the amino acid sequence SEQ ID NO: 1894.

[2978] In one aspect, an antibody or antigen-binding fragment thereof is provided, wherein the antibody or antigen-binding fragment thereof comprises a light chain variable domain (VL) having at least 90%, 91%, 92%, 93%, 94%, 95%, 96%, 97%, 98%, 99%, or 100% sequence identity to the amino acid sequence SEQ ID NO: 539. In some embodiments, a VL sequence having at least 90%, 91%, 92%, 93%, 94%, 95%, 96%, 97%, 98%, or 99% identity contains substitutions (e.g., conservative substitutions), insertions, or deletions relative to the reference sequence, but an antibody or antigen-binding fragment thereof comprising that sequence retains the ability to bind to same antigen as the parent (e.g., cancer associated antigen). In some embodiments, a total of 1 to 10 amino acids have been substituted, inserted and/or deleted in the amino acid sequence SEQ ID NO: 539. In some embodiments, the substitutions, insertions, or deletions occur in regions outside the CDRs (e.g., in the FRs). Optionally, the antibody or antigen-binding fragment thereof comprises the VL sequence SEQ ID NO: 539, including one or more post-translational modifications of that sequence. In a particular embodiment, the VL comprises one, two or three CDRs selected from: a. CDR-L1, comprising the amino acid sequence SEQ ID NO: 1081, b. CDR-L2, comprising the amino acid sequence SEQ ID NO: 1623, and c. CDR-L3, comprising the amino acid sequence SEQ ID NO: 2165.

[2979] In one aspect, an antibody or antigen-binding fragment thereof is provided, wherein the antibody or antigen-binding fragment thereof comprises a VH as in any of the embodiments provided above, and a VL as in any of the embodiments provided above. In some embodiments, the antibody or antigen-binding fragment thereof comprises the VH amino acid sequence of SEQ ID NO: 268, and the VL amino acid sequence of SEQ ID NO: 539, optionally including post-translational modifications of those sequences.

### TUCS1003

[2980] In one aspect, the present disclosure provides an antibody or antigen-binding fragment thereof comprising at least one or both variable regions selected from: a. VH comprising the amino acid sequence of SEQ ID NO: 269 and b. VL comprising the amino acid sequence of SEQ ID NO: 540.

[2981] In one aspect, the present disclosure provides an antibody or antigen-binding fragment thereof comprising at least one, two, three, four, five, or six CDRs selected from: a. CDR-H1 comprising the amino acid sequence of SEQ ID NO: 811, b. CDR-H2 comprising the amino acid sequence of SEQ ID NO: 1353, c. CDR-H3 comprising the amino acid sequence of SEQ ID NO: 1895, d. CDR-L1 comprising the amino acid sequence of SEQ ID NO: 1082, e. CDR-L2 comprising the amino acid sequence of SEQ ID NO: 1624, and f. CDR-L3 comprising the amino acid sequence of SEQ ID NO: 2166.

[2982] In one aspect, the present disclosure provides an antibody or antigen-binding fragment thereof comprising a CDR-H3 comprising the amino acid sequence of SEQ ID NO: 1895, and a CDR-L3 comprising the amino acid sequence of SEQ ID NO: 2166.

[2983] In one aspect, the present disclosure provides an antibody or antigen-binding fragment thereof comprising at least one, at least two, or all three VH CDR sequences selected from: a. CDR-H1 comprising the amino acid sequence of SEQ ID NO: 811, b. CDR-H2 comprising the amino acid sequence of SEQ ID NO: 1353, c. CDR-H3 comprising the amino acid sequence of SEQ ID NO: 1895, and a VL comprising the amino acid sequence of SEQ ID NO: 540.

[2984] In one aspect, the present disclosure provides an antibody or antigen-binding fragment thereof comprising at least one, at least two, or all three VL CDR sequences selected from: a. CDR-L1 comprising the amino acid sequence of SEQ ID NO: 1082, b. CDR-L2 comprising the amino acid sequence of SEQ ID NO: 1624, c. CDR-L3 comprising the amino acid sequence of SEQ ID NO: 2166, and a VH comprising the amino acid sequence of SEQ ID NO: 269.

[2985] In one aspect, an antibody or antigen-binding fragment thereof is provided, wherein the antibody or antigen-binding fragment thereof comprises a heavy chain variable domain (VH) having at least 90%, 91%, 92%, 93%, 94%, 95%, 96%, 97%, 98%, 99%, or 100% sequence identity to the amino acid sequence SEQ ID NO: 269. In some embodiments, a VH sequence having at least 90%, 91%, 92%, 93%, 94%, 95%, 96%, 97%, 98%, or 99% identity contains substitutions (e.g., conservative substitutions), insertions, or deletions relative to the reference sequence, but an antibody or antigen-binding fragment thereof comprising that sequence retains the ability to bind to same antigen as of the parent (e.g., cancer associated antigen). In some embodiments, a total of 1 to 10 amino acids have been substituted, inserted and/or deleted in the amino acid sequence SEQ ID NO: 269. In some embodiments, substitutions, insertions, or deletions occur in regions outside the CDRs (e.g., in the FRs). Optionally, the antibody or antigen-binding fragment thereof comprises the VH sequence SEQ ID NO: 269, including one or more post-translational modifications of that sequence. In a particular embodiment, the VH comprises one, two or three CDRs selected from: a. CDR-H1, comprising the amino acid sequence SEQ ID NO: 811, b. CDR-H2, comprising the amino acid sequence SEQ ID NO: 1353, and c. CDR-H3, comprising the amino acid sequence SEQ ID NO: 1895.

[2986] In one aspect, an antibody or antigen-binding fragment thereof is provided, wherein the antibody or antigen-binding fragment thereof comprises a light chain variable domain (VL) having at least 90%, 91%, 92%, 93%, 94%, 95%, 96%, 97%, 98%, 99%, or 100% sequence identity to the amino acid sequence SEQ ID NO: 540. In some embodiments, a VL sequence having at least 90%, 91%, 92%, 93%, 94%, 95%, 96%, 97%, 98%, or 99% identity contains substitutions (e.g., conservative substitutions), insertions, or deletions relative to the reference sequence, but an antibody or antigen-binding fragment thereof comprising that sequence retains the ability to bind to same antigen as the parent (e.g., cancer associated antigen). In some embodiments, a total of 1 to 10 amino acids have been substituted, inserted and/or deleted in the amino acid sequence SEQ ID NO: 540. In some embodiments, the substitutions, insertions, or deletions occur in regions outside the CDRs (e.g., in the FRs). Optionally, the antibody or antigen-binding fragment thereof comprises the VL sequence SEQ ID NO: 540, including one or more post-translational modifications of that sequence. In a particular embodiment, the VL comprises one, two or three CDRs selected from: a. CDR-L1, comprising the amino acid sequence SEQ ID NO: 1082, b. CDR-L2, comprising the amino acid sequence SEQ ID NO: 1624, and c. CDR-L3, comprising the amino acid sequence SEQ ID NO: 2166.

[2987] In one aspect, an antibody or antigen-binding fragment thereof is provided, wherein the antibody or antigen-binding fragment thereof comprises a VH as in any of the embodiments provided above, and a VL as in any of the embodiments provided above. In some embodiments, the antibody or antigen-binding fragment thereof comprises the VH amino acid sequence of SEQ ID NO: 269, and the VL amino acid sequence of SEQ ID NO: 540, optionally including post-translational modifications of those sequences.

### TUVM1001

[2988] In one aspect, the present disclosure provides an antibody or antigen-binding fragment thereof comprising at least one or both variable regions selected from: a. VH comprising the amino acid sequence of SEQ ID NO: 270 and b. VL comprising the amino acid sequence of SEQ ID NO: 541.

[2989] In one aspect, the present disclosure provides an antibody or antigen-binding fragment thereof comprising at least one, two, three, four, five, or six CDRs selected from: a. CDR-H1 comprising the amino acid sequence of SEQ ID NO: 812, b. CDR-H2 comprising the amino acid sequence of SEQ ID NO: 1354, c. CDR-H3 comprising the amino acid sequence of SEQ ID NO: 1896, d. CDR-L1 comprising the amino acid sequence of SEQ ID NO: 1083, e. CDR-L2 comprising the amino acid sequence of SEQ ID NO: 1625, and f. CDR-L3 comprising the amino acid sequence of SEQ ID NO: 2167.

[2990] In one aspect, the present disclosure provides an antibody or antigen-binding fragment thereof comprising a CDR-H3 comprising the amino acid sequence of SEQ ID NO: 1896, and a CDR-L3 comprising the amino acid sequence of SEQ ID NO: 2167.

[2991] In one aspect, the present disclosure provides an antibody or antigen-binding fragment thereof comprising at least one, at least two, or all three VH CDR sequences selected from: a. CDR-H1 comprising the amino acid sequence of SEQ ID NO: 812, b. CDR-H2 comprising the amino acid sequence of SEQ ID NO: 1354, c. CDR-H3 comprising the amino acid sequence of SEQ ID NO: 1896, and a VL comprising the amino acid sequence of SEQ ID NO: 541.

[2992] In one aspect, the present disclosure provides an antibody or antigen-binding fragment thereof comprising at least one, at least two, or all three VL CDR sequences selected from: a. CDR-L1 comprising the amino acid sequence of SEQ ID NO: 1083, b. CDR-L2 comprising the amino acid sequence of SEQ ID NO: 1625, c. CDR-L3 comprising the amino acid sequence of SEQ ID NO: 2167, and a VH comprising the amino acid sequence of SEQ ID NO: 270.

[2993] In one aspect, an antibody or antigen-binding fragment thereof is provided, wherein the antibody or antigen-binding fragment thereof comprises a heavy chain variable domain (VH) having at least 90%, 91%, 92%, 93%, 94%, 95%, 96%, 97%, 98%, 99%, or 100% sequence identity to the amino acid sequence SEQ ID NO: 270. In some embodiments, a VH sequence having at least 90%, 91%, 92%, 93%, 94%, 95%, 96%, 97%, 98%, or 99% identity contains substitutions (e.g., conservative substitutions), insertions, or deletions relative to the reference sequence, but an antibody or antigen-binding fragment thereof comprising that sequence retains the ability to bind to same antigen as of the parent (e.g., cancer associated antigen). In some embodiments, a total of 1 to 10 amino acids have been substituted, inserted and/or deleted in the amino acid sequence SEQ ID NO: 270. In some embodiments, substitutions, insertions, or deletions occur in regions outside the CDRs (e.g., in the FRs). Optionally, the antibody or antigen-binding fragment thereof comprises the VH sequence SEQ ID NO: 270, including one or more post-translational modifications of that sequence. In a particular embodiment, the VH comprises one, two or three CDRs selected from: a. CDR-H1, comprising the amino acid sequence SEQ ID NO: 812, b. CDR-H2, comprising the amino acid sequence SEQ ID NO: 1354, and c. CDR-H3, comprising the amino acid sequence SEQ ID NO: 1896.

[2994] In one aspect, an antibody or antigen-binding fragment thereof is provided, wherein the antibody or antigen-binding fragment thereof comprises a light chain variable domain (VL) having at least 90%, 91%, 92%, 93%, 94%, 95%, 96%, 97%, 98%, 99%, or 100% sequence identity to the amino acid sequence SEQ ID NO: 541. In some embodiments, a VL sequence having at least 90%, 91%, 92%, 93%, 94%, 95%, 96%, 97%, 98%, or 99% identity contains substitutions (e.g., conservative substitutions), insertions, or deletions relative to the reference sequence, but an antibody or antigen-binding fragment thereof comprising that sequence retains the ability to bind to same antigen as the parent (e.g., cancer associated antigen). In some embodiments, a total of 1 to 10 amino acids have been substituted, inserted and/or deleted in the amino acid sequence SEQ ID NO: 541. In some embodiments, the substitutions, insertions, or deletions occur in regions outside the CDRs (e.g., in the FRs). Optionally, the antibody or antigen-binding fragment thereof comprises the VL sequence SEQ ID NO: 541, including one or more post-translational modifications of that sequence. In a particular embodiment, the VL comprises one, two or three CDRs selected from: a. CDR-L1, comprising the amino acid sequence SEQ ID NO: 1083, b. CDR-L2, comprising the amino acid sequence SEQ ID NO: 1625, and c. CDR-L3, comprising the amino acid sequence SEQ ID NO: 2167.

[2995] In one aspect, an antibody or antigen-binding fragment thereof is provided, wherein the antibody or antigen-binding fragment thereof comprises a VH as in any of the embodiments provided above, and a VL as in any of the embodiments provided above. In some embodiments, the antibody or antigen-binding fragment thereof comprises the VH amino acid sequence of SEQ ID NO: 270, and the VL amino acid sequence of SEQ ID NO: 541, optionally including post-translational modifications of those sequences.

### TUVM1002

[2996] In one aspect, the present disclosure provides an antibody or antigen-binding fragment thereof comprising at least one or both variable regions selected from: a. VH comprising the amino acid sequence of SEQ ID NO: 271 and b. VL comprising the amino acid sequence of SEQ ID NO: 542.

[2997] In one aspect, the present disclosure provides an antibody or antigen-binding fragment thereof comprising at least one, two, three, four, five, or six CDRs selected from: a. CDR-H1 comprising the amino acid sequence of SEQ ID NO: 813, b. CDR-H2 comprising the amino acid sequence of SEQ ID NO: 1355, c. CDR-H3 comprising the amino acid sequence of SEQ ID NO: 1897, d. CDR-L1 comprising the amino acid sequence of SEQ ID NO: 1084, e. CDR-L2 comprising the amino acid sequence of SEQ ID NO: 1626, and f. CDR-L3 comprising the amino acid sequence of SEQ ID NO: 2168.

[2998] In one aspect, the present disclosure provides an antibody or antigen-binding fragment thereof comprising a CDR-H3 comprising the amino acid sequence of SEQ ID NO: 1897, and a CDR-L3 comprising the amino acid sequence of SEQ ID NO: 2168.

[2999] In one aspect, the present disclosure provides an antibody or antigen-binding fragment thereof comprising at least one, at least two, or all three VH CDR sequences selected from: a. CDR-H1 comprising the amino acid sequence of SEQ ID NO: 813, b. CDR-H2 comprising the amino acid sequence of SEQ ID NO: 1355, c. CDR-H3 comprising the amino acid sequence of SEQ ID NO: 1897, and a VL comprising the amino acid sequence of SEQ ID NO: 542.

[3000] In one aspect, the present disclosure provides an antibody or antigen-binding fragment thereof comprising at least one, at least two, or all three VL CDR sequences selected from: a. CDR-L1 comprising the amino acid sequence of SEQ ID NO: 1084, b. CDR-L2 comprising the amino acid sequence of SEQ ID NO: 1626, c. CDR-L3 comprising the amino acid sequence of SEQ ID NO: 2168, and a VH comprising the amino acid sequence of SEQ ID NO: 271.

[3001] In one aspect, an antibody or antigen-binding fragment thereof is provided, wherein the antibody or antigen-binding fragment thereof comprises a heavy chain variable domain (VH) having at least 90%, 91%, 92%, 93%, 94%, 95%, 96%, 97%, 98%, 99%, or 100% sequence identity to the amino acid sequence SEQ ID NO: 271. In some embodiments, a VH sequence having at least 90%, 91%, 92%, 93%, 94%, 95%, 96%, 97%, 98%, or 99% identity contains substitutions (e.g., conservative substitutions), insertions, or deletions relative to the reference sequence, but an antibody or antigen-binding fragment thereof comprising that sequence retains the ability to bind to same antigen as of the parent (e.g., cancer associated antigen). In some embodiments, a total of 1 to 10 amino acids have been substituted, inserted and/or deleted in the amino acid sequence SEQ ID NO: 271. In some embodiments, substitutions, insertions, or deletions occur in regions outside the CDRs (e.g., in the FRs). Optionally, the antibody or antigen-binding fragment thereof comprises the VH sequence SEQ ID NO: 271, including one or more post-translational modifications of that sequence. In a particular embodiment, the VH comprises one, two or three CDRs selected from: a. CDR-H1, comprising the amino acid sequence SEQ ID NO: 813, b. CDR-H2, comprising the amino acid sequence SEQ ID NO: 1355, and a. CDR-H3, comprising the amino acid sequence SEQ ID NO: 1897.

[3002] In one aspect, an antibody or antigen-binding fragment thereof is provided, wherein the antibody or antigen-binding fragment thereof comprises a light chain variable domain (VL) having at least 90%, 91%, 92%, 93%, 94%, 95%, 96%, 97%, 98%, 99%, or 100% sequence identity to the amino acid sequence SEQ ID NO: 542. In some embodiments, a VL sequence having at least 90%, 91%, 92%, 93%, 94%, 95%, 96%, 97%, 98%, or 99% identity contains substitutions (e.g., conservative substitutions), insertions, or deletions relative to the reference sequence, but an antibody or antigen-binding fragment thereof comprising that sequence retains the ability to bind to same antigen as the parent (e.g., cancer associated antigen). In some embodiments, a total of 1 to 10 amino acids have been substituted, inserted and/or deleted in the amino acid sequence SEQ ID NO: 542. In some embodiments, the substitutions, insertions, or deletions occur in regions outside the CDRs (e.g., in the FRs). Optionally, the antibody or antigen-binding fragment thereof comprises the VL sequence SEQ ID NO: 542, including one or more post-translational modifications of that sequence. In a particular embodiment, the VL comprises one, two or three CDRs selected from: a. CDR-L1, comprising the amino acid sequence SEQ ID NO: 1084, b. CDR-L2, comprising the amino acid sequence SEQ ID NO: 1626, and c. CDR-L3, comprising the amino acid sequence SEQ ID NO: 2168.

[3003] In one aspect, an antibody or antigen-binding fragment thereof is provided, wherein the antibody or antigen-binding fragment thereof comprises a VH as in any of the embodiments provided above, and a VL as in any of the embodiments provided above. In some embodiments, the antibody or antigen-binding fragment thereof comprises the VH amino acid sequence of SEQ ID NO: 271, and the VL amino acid sequence of SEQ ID NO: 542, optionally including post-translational modifications of those sequences.

### Mutation Frequency

[3004] The antibodies or antigen-binding fragment thereof of the present disclosure can comprise a heavy chain sequence with a mutation frequency of at least about 5%, 6%, 7%, 8%, 9%, 10%, 11%, 12%, 13%, 14%, 15%, 16%, 17%, 18%, 19%, or 20%, or higher from a germline sequence. The antibodies of the present disclosure can comprise a CDR3 region that is a light chain sequence with a mutation frequency of at least about 5%, 6%, 7%, 8%, 9%, 10%, 11%, 12%, 13%, 14%, 15%, 16%, 17%, 18%, 19%, or 20%, or higher from a germline sequence. The antibodies or antigen-binding fragment thereof of the invention can comprise a heavy chain and a light chain sequence with a mutation frequency of at least about 5%, 6%, 7%, 8%, 9%, 10%, 11%, 12%, 13%, 14%, 15%, 16%, 17%, 18%, 19%, or 20%, or higher from a germline sequence. The antibodies or antigen-binding fragment thereof of the invention can comprise a VH region from a VH family selected from the group consisting of any one of VH family 4-59.

### Competitive Antibody

[3005] In some embodiments, antibodies which compete with the antibodies provided herein for binding to specified antigens (e.g., antigen in Table 3 and Table 4) are provided. In some embodiments, antibodies compete with the antibodies provided herein for binding to an epitope on the specified antigen.

[3006] In some embodiments, competition assays may be used to identify a monoclonal antibody that competes with an antibody described herein. Competition assays can be used to determine whether two antibodies bind the same epitope by recognizing identical or sterically overlapping epitopes or one antibody competitively inhibits binding of another antibody to the antigen. In some embodiments, such a competing antibody binds to the same epitope that is bound by an antibody described herein. Exemplary competition assays include, but are not limited to, routine assays such as those provided in Harlow and Lane (1988) Antibodies: A Laboratory Manual ch.14 (Cold Spring Harbor Laboratory, Cold Spring Harbor, N.Y.). Detailed exemplary methods for mapping an epitope to which an antibody binds are provided in Morris (1996) “Epitope Mapping Protocols,” in Methods in Molecular Biology vol. 66 (Humana Press, Totowa, N.J.). In some embodiments, two antibodies are said to bind to the same epitope if each blocks binding of the other by 50% or more. In some embodiments, the antibody that competes with an antibody described herein is a chimeric, humanized or human antibody. In some embodiments, an antibody that competes with a chimeric, humanized, or human antibody as described herein is provided.

[3007] In some embodiments, antibodies that bind to any one or more of the epitopes that the antibodies provided herein are provided. In some embodiments, antibodies that bind and overlap an epitope to which the present antibodies bind to are provided. In some embodiments, an antibody is provided that competes with at least one of the antibodies provided herein. In some embodiments, an antibody is provided that competes with at least two of the antibodies provided herein. In some embodiments, an antibody is provided that competes with at least three of the antibodies provided herein. In some embodiments, the antibody binds to an overlapping epitope as an antibody described in the examples herein. In some embodiments, the entire epitope is bound and/or obstructed by the competing antibody. In some embodiments, a part of the epitope is bound and/or obstructed by the competing antibody. In some embodiments, the competing antibody's paratope binds to at least a part of the epitope of an antibody provided herein. In some embodiments, the competing antibody's paratope binds the target, and a different section of the competing antibody's structure obstruct at least a part of the epitope of an antibody provided herein.

[3008] The term “competition” or “cross-competition” refers to the ability of an antibody molecule, e.g., an antibody molecule that interferes with the binding of an antibody the invention to a target, e.g., antigens in Table 3 and Table 4; is used interchangeably herein. Interference to binding may be direct or indirect (e.g., through allosteric modulation of the antibody molecule or target). The degree to which antibody molecules can interfere with the binding of other antibody molecules to the target and thus whether they can compete can be determined using competitive binding assays, such as FACS analysis, ELISA or BIACORE analysis. In some embodiments, the competitive binding assay is a quantitative competitive assay. In some embodiments, the first antibody molecule has a binding of the first antibody molecule to a target that is greater than or equal to 10%, such as greater than or equal to 20% (e. G., Greater than or equal to 10%, 30% or more, 40% or more, 50% or more, 55% or more, 60% or more, 65% or more, 70% or more, 75% or more, 80% or more, 85% or more, 90% %, More than 99%, compared to the antibody of the second antibody molecule.

### Methods of Making Antibodies

[3009] The antibodies or antigen binding fragment thereof of the present disclosure can be obtained using the in silico reconstructed, complete nucleic acid sequences and amino acid sequences of cancer associated antibodies or antigen binding fragment thereof disclosed herein. In some embodiments, antibodies or antigen binding fragment thereof prepared by the methods described below are provided. In some embodiments, the antibody or antigen binding fragment thereof is prepared in a host cell. In some embodiments, the antibody or antigen binding fragment thereof is isolated from a host cell. In some embodiments, the antibody or antigen binding fragment thereof is prepared in a cell-free system. In some embodiments, the antibody or antigen binding fragment thereof is purified. The present invention also provides a method of producing an antibody molecule of the invention, said method generally comprising the steps of: Culturing a host cell comprising an expression vector comprising a nucleic acid encoding an antibody molecule of the invention under conditions permitting the formation of an antibody of the invention; isolating the antibody molecule expressed by the host cell from the culture; And Optionally, further purifying and/or modifying and/or formulating an antibody molecule of the invention.

[3010] Nucleic acid molecules encoding the antibodies or antigen binding fragment thereof of the present disclosure can be isolated, for example, from mature mammalian B lymphocyte or when fused with an immortalized cell as part of a hybridoma culture, using conventional procedures (e.g., by using oligonucleotide probes that are capable of binding specifically to genes encoding the heavy and light chains of a desired antibody). The disclosure provides isolated nucleic acid molecule comprising a nucleic acid sequence encoding an antibody polypeptide or antigen binding fragment thereof. Isolated nucleic acid molecule comprising the sequences disclosed herein can be prepared using (a) recombinant methods, (b) synthetic techniques, (c) purification techniques, and/or (d) combinations thereof, as is well known in the art and discussed below. Messenger RNA coding for the antibodies or antigen binding fragment thereof (e.g., heavy or light chain) can be isolated from a suitable source, either mature B cells or a hybridoma culture, employing standard techniques of RNA isolation, and the use of oligo-dT cellulose chromatography to segregate the poly-A mRNA. The poly-A mRNA may, further, be fractionated to obtain sequences of sufficient size to code for the amino acid sequences in the light or heavy chain of the desired antibody as the case may be.

[3011] For example, a cDNA library may be constructed by reverse transcription of polyA+mRNA, preferably membrane-associated mRNA, and the library screened using a suitable primer, preferably a nucleic acid sequence which is characteristic of the desired cDNA. Such a primer can be easily hypothesized and synthesized based on the cDNA or the amino acid sequence of an antibody if the sequence is known, for example, the primer can be synthesized based on the nucleic acid sequence or the amino acid sequence of the antibodies disclosed herein.

[3012] In some embodiments, however, the polymerase chain reaction (PCR) using the primers described above is used to amplify cDNAs (or portions of full-length cDNAs) encoding one or more immunoglobulin gene segment of interest (e.g., a light chain variable segment). The amplified sequences can be readily cloned into any suitable vector, e.g., expression vectors, minigene vectors, or phage display vectors. In some embodiments, the nucleic acid sequence of the antibodies or antigen binding fragment thereof, of the present disclosure can be readily cloned into any suitable vector, e.g., expression vectors, minigene vectors, or phage display vectors. Cloning is carried out using standard techniques (see, e.g., Sambrook et al. (1989) Molecular Cloning: A Laboratory Guide, Vols 1-3, Cold Spring Harbor Press, which is incorporated herein by reference). It will be appreciated that the particular method of cloning used not critical, so long as it is possible to determine the sequence of some portion of the immunoglobulin polypeptide of interest.

[3013] One source for RNA used for cloning and isolating nucleic acid sequence encoding a desired antibody or antigen-binding fragment thereof, is a hybridoma produced by fusing a B cell producing the antibody to an immortal cell. An advantage of using hybridomas is that they can be easily screened, and a hybridoma that produces the antibody of interest selected. Alternatively, RNA can be isolated from antibody-producing cells (e.g., B-cells) from the peripheral blood or, preferably the spleen or lymph nodes, or whole spleen, of a subject (e.g., humans or other suitable animals). In some embodiments, the human or suitable animal has been immunized against a target antigen. Recombinant antigens or fragments thereof can be used to immunize mice to generate the hybridomas that produce the antibodies of the instant disclosure. In some embodiments, provided herein is a hybridoma generating the antibodies or the present disclosure. The antigen may include an antigenic polypeptide, a fusion protein or variants thereof. Depending upon the nature of the polypeptides (i.e., percent hydrophobicity, percent hydrophilicity, stability, net charge, isoelectric point etc.), it may be useful to conjugate the antigen to a protein known to be immunogenic in the mammal being immunized. As it relates to the present disclosure, the subject can be one suffering from a cancer.

[3014] Based on the in silico reconstructed nucleic acid and amino acid sequences of the cancer associated antibody, the isolated nucleic acid molecule encoding a cancer associated antibody or an antigen binding fragment thereof, can also be prepared by direct chemical synthesis by known methods (see, e.g., Ausubel et al., Supra, WO1999014318A1). Chemical synthesis generally produces a single stranded oligonucleotide, which can become dsDNA by hybridization with a complementary sequence, or by polymerization with a DNA polymerase using the single strand as a template. One skilled in the art will recognize that while chemical synthesis of DNA can be limited to sequences of about 100 or more bases, longer sequences may be obtained by the ligation of shorter sequences.

[3015] The disclosure provides isolated nucleic acid molecule comprising a nucleic acid sequence encoding an antibody polypeptide or antigen-binding fragment thereof. In some embodiments, the isolated nucleic acid molecule comprises a nucleic acid sequence encoding a heavy chain polypeptide of an antibody. In some embodiments, the nucleic acid sequence encoding a heavy chain polypeptide is selected from any one of SEQ ID NOS: 2169-2439. In some embodiments, the isolated nucleic acid molecule comprises a nucleic acid sequence encoding a light chain polypeptide of an antibody. In some embodiments, the nucleic acid sequence encoding a light chain polypeptide is selected from any one of SEQ ID NOS: 2440-2710. In some embodiments, the isolated nucleic acid molecule comprises a nucleic acid sequence encoding a CDR1, CDR2, or CDR3 polypeptide of a variable heavy chain. In some embodiments, the isolated nucleic acid molecule comprises a nucleic acid sequence encoding a CDR1, CDR2, or CDR3 polypeptide of a variable light chain. In some embodiments, the nucleic acid sequence encoding the CDR1 polypeptide of a variable heavy chain (CDR-H1) is selected from any one of SEQ ID NOS: 2711-2981. In some embodiments, the nucleic acid sequence encoding the CDR2 polypeptide of a variable heavy chain (CDR-H2) is selected from any one of SEQ ID NOS: 3253-3523. In some embodiments, the nucleic acid sequence the nucleic acid sequence encoding the CDR3 polypeptide of a variable heavy chain (CDR-H3) is selected from any one of SEQ ID NOS: 3795-4065. In some embodiments, the isolated nucleic acid comprises a sequence encoding a CDR1, CDR2, or CDR3 polypeptide of a variable light chain. In some embodiments, the nucleic acid sequence encoding the CDR1 region of a variable light chain polypeptide (CDR-L1) is selected from any one of SEQ ID NOS: 2982-3252. In some embodiments, the nucleic acid sequence encoding the CDR2 region of a variable light chain polypeptide (CDR-L2) is selected from any one of SEQ ID NOS: 3524-3794. In some embodiments, the nucleic acid sequence encoding the CDR3 region of a variable light chain polypeptide (CDR-L3) is selected from any one of SEQ ID NOS: 4066-4336.

[3016] The terms “nucleic acid molecule”, “nucleic acid” and “polynucleotide” may be used interchangeably, and refer to a polymer of nucleotides. Such polymers of nucleotides may contain natural and/or non-natural nucleotides, and include, but are not limited to, DNA, RNA, and PNA. “Nucleic acid sequence” refers to the linear sequence of nucleotides.

[3017] As used herein, an “isolated” nucleic acid molecule or “isolated” nucleic acid sequence is a nucleic acid molecule that is either (1) identified and separated from at least one contaminant nucleic acid molecule with which it is ordinarily associated in the natural source of the nucleic acid or (2) cloned, amplified, tagged, or otherwise distinguished from background nucleic acids such that the sequence of the nucleic acid of interest can be determined, is considered isolated. An isolated nucleic acid molecule is other than in the form or setting in which it is found in nature. Isolated nucleic acid molecules therefore are distinguished from the nucleic acid molecule as it exists in natural cells. However, an isolated nucleic acid molecule includes a nucleic acid molecule contained in cells that ordinarily express the antibody where, for example, the nucleic acid molecule is in a chromosomal location different from that of natural cells. “Isolated nucleic acid”, as used herein, is a nucleic acid that is substantially separated from other genome DNA sequences as well as proteins or complexes such as ribosomes and polymerases, which naturally accompany a native sequence. The term embraces a nucleic acid sequence that has been removed from its naturally occurring environment, and includes recombinant or cloned DNA isolates and chemically synthesized analogues or analogues biologically synthesized by heterologous systems. A substantially pure nucleic acid includes isolated forms of the nucleic acid. Of course, this refers to the nucleic acid as originally isolated and does not exclude genes or sequences later added to the isolated nucleic acid by the hand of man. The term “polypeptide” is used in its conventional meaning, i.e., as a sequence of amino acids.

[3018] An isolated nucleic acid molecule encoding the antibody, portion or polypeptide of the present disclosure can be recombined with vector DNA (e.g., expression vector) in accordance with conventional techniques, including blunt-ended or staggered-ended termini for ligation, restriction enzyme digestion to provide appropriate termini, filling in of cohesive ends as appropriate, alkaline phosphatase treatment to avoid undesirable joining, and ligation with appropriate ligases. Techniques for such manipulations are disclosed, e.g., by Maniatis et al., Molecular Cloning, Lab. Manual (Cold Spring Harbor Lab. Press, N Y, 1982 and 1989), and Ausubel, 1987, 1993, and can be used to construct nucleic acid sequences which encode an antibody molecule or antigen binding region thereof. Accordingly, the disclosure provides for a vector or expression vector comprising the isolated nucleic acids set forth herein. In one embodiment, the nucleic acid coding for the light chain and that coding for the heavy chain are isolated separately by the procedures outlined above. In one embodiment, the isolated nucleic acid encoding the light chain and that coding for the heavy chain may be inserted into separate expression plasmids, or together in the same plasmid, so long as each is under suitable promoter and translation control.

[3019] Once the isolated nucleic acid molecule is placed into an expression vector, they are then transfected into host cells such as E. coli cells, simian COS cells, human embryonic kidney 293 cells (e.g., 293E cells), Chinese hamster ovary (CHO) cells, or myeloma cells that do not otherwise produce immunoglobulin protein, to obtain the synthesis of the antibody or an antigen-binding fragment thereof in the recombinant host cells. Recombinant production of antibodies is well known in the art. Many vectors are available. The vector components generally include, but are not limited to, one or more of the following: a signal sequence, an origin of replication, one or more selective marker genes, an enhancer element, a promoter, and a transcription termination sequence.

[3020] The isolated nucleic acid molecules are operably linked to an expression control sequence in the vector DNA. Expression control sequence refers to DNA sequences necessary for the expression of an operably linked coding sequence in a particular host organism. The control sequences that are suitable for prokaryotes, for example, include a promoter, optionally an operator sequence, and a ribosome binding site. Eukaryotic cells are known to utilize promoters, polyadenylation signals, and enhancers. The term “operably linked” or “transcriptional control” refers to functional linkage between a regulatory sequence and a heterologous nucleic acid sequence resulting in expression of the latter. For example, a first nucleic acid sequence is operably linked with a second nucleic acid sequence when the first nucleic acid sequence is placed in a functional relationship with the second nucleic acid sequence. For instance, a promoter is operably linked to a coding sequence if the promoter affects the transcription or expression of the coding sequence. Operably linked DNA sequences can be contiguous with each other and, e.g., where necessary to join two protein coding regions, are in the same reading frame.

[3021] Nucleic acid is operably linked when it is placed into a functional relationship with another nucleic acid sequence. For example, a promoter or enhancer is operably linked to a coding sequence if it affects the transcription of the sequence; or a ribosome binding site is operably linked to a coding sequence if it is positioned so as to facilitate translation. Generally, operably linked means that the DNA sequences being linked are contiguous, and/or can contiguous and in reading phase. However, enhancers do not have to be contiguous. Linking is accomplished by ligation at convenient restriction sites. If such sites do not exist, the synthetic oligonucleotide adaptors or linkers are used in accordance with conventional practice.

[3022] Cell, cell line, and cell culture are often used interchangeably and all such designations herein include progeny. Transformants and transformed cells include the primary subject cell and cultures derived therefrom without regard for the number of transfers. It is also understood that all progeny may not be precisely identical in DNA content, due to deliberate or inadvertent mutations. Mutant progeny that have the same function or biological activity as screened for in the originally transformed cell are included. Where distinct designations are intended, it will be clear from the context. In an alternative embodiment, suitable encoding nucleic acid sequences can be designed according to a universal codon table, based on the known amino acid sequence of an immunoglobulin of interest.

[3023] Amino acid sequence variants of the desired antibody may be prepared by introducing appropriate nucleotide changes into the encoding DNA, or by peptide synthesis. Such variants include, for example, deletions from, and/or insertions into and/or substitutions of, residues within the amino acid sequences of the antibodies. Any combination of deletion, insertion, and substitution is made to arrive at the final construct, provided that the final construct possesses the desired characteristics. The amino acid changes also may alter post-translational processes of the monoclonal, human, humanized, or variant antibody, such as changing the number or position of glycosylation sites.

[3024] Nucleic acid molecules encoding amino acid sequence variants of the antibody are prepared by various methods. These methods include, but are not limited to, isolation from a natural source (in the case of naturally occurring amino acid sequence variants) or preparation by oligonucleotide-mediated (or site-directed) mutagenesis, PCR mutagenesis, and cassette mutagenesis of an earlier prepared variant or a non-variant version of the antibody. The present disclosure also provides isolated nucleic acid molecules encoding for antibodies or antigen binding fragment thereof, described herein, optionally operably linked to regulatory control sequences recognized by a host cell, vectors and host cells comprising the nucleic acids, and recombinant techniques for the production of the antibodies, which may comprise culturing the host cell so that the nucleic acid is expressed and, optionally, recovering the antibody from the host cell culture or culture medium. For recombinant production of an antibody or antigen binding fragment thereof, the nucleic acid molecule encoding it can be isolated and inserted into a replicable vector for further cloning (amplification of the DNA) or for expression. Accordingly provided herein are isolated antibody or antigen binding fragment thereof. In some embodiments, the antibodies or the present disclosure or antigen binding fragment thereof can be recombinant antibody. The term “recombinant antibody” refers to an antibody that is expressed from a cell or cell line transfected with an expression vector (or possibly more than one expression vector, typically two expression vectors) comprising the coding sequence of the antibody, where said coding sequence is not naturally associated with the cell. In one embodiment, a recombinant antibody has a glycosylation pattern that is different than the glycosylation pattern of an antibody having the same sequence if it were to exist in nature. In one embodiment, a recombinant antibody is expressed in a mammalian host cell which is not a human host cell. Notably, individual mammalian host cells have unique glycosylation patterns

[3025] In some embodiments, the antibodies or antigen binding fragment thereof of the present disclosure are isolated. With regards to the an isolated antibody polypeptide or an antigen binding fragment polypeptide; “isolated” is referred to when the polypeptide is separated from at least some of the components of the cell (e.g., host cell) in which it was produced. Where a polypeptide is secreted by a host cell after expression, physically separating the supernatant containing the polypeptide from the host cell that produced it is considered to be “isolating” the polypeptide. The term “isolated” refers to a protein (e.g., an antibody) that is substantially free of other cellular material and/or chemicals. In one embodiment, an isolated antibody is substantially free of other proteins from the same species. In one embodiment, an isolated antibody is expressed by a cell from a different species and is substantially free of other proteins from the difference species. A protein may be rendered substantially free of naturally associated components (or components associated with the cellular expression system used to produce the antibody) by isolation, using protein purification techniques well known in the art.

[3026] In some embodiments, the antibody or antigen binding fragment thereof disclosed herein is produced in a cell-free system. Nonlimiting exemplary cell-free systems are described, for example, in Sitaraman et al., Methods Mol. Biol. 498: 229-44 (2009); Spirin, Trends Biotechnol. 22: 538-45 (2004); Endo et al., Biotechnol. Adv. 21: 695-713 (2003). For such purposes the nucleic acids encoding the polypeptide must be modified to allow in vitro transcription to produce mRNA and to allow cell-free translation of the mRNA in the particular cell-free system being utilized (eukaryotic such as a mammalian or yeast cell-free translation system or prokaryotic such as a bacterial cell-free translation system. Antibody polypeptides can also be produced by chemical synthesis (e.g., by the methods described in Solid Phase Peptide Synthesis, 2nd ed., 1984, The Pierce Chemical Co., Rockford, Ill.). Modifications to the protein can also be produced by chemical synthesis. In some embodiments, the antibodies or antigen binding fragment of the present disclosure is synthetic. The polypeptides of the present disclosure can be purified by isolation/purification methods for proteins generally known in the field of protein chemistry.

[3027] When sources other than hybridomas are used to obtain antibodies, it may be desirable to screen for sequences encoding immunoglobulins or immunoglobulin polypeptides with specific binding characteristics. One method for such screening is the use of phage display technology. Phage display is described in e.g., Dower et al., McCafferty et al., and Caton and Koprowski, Proc. Natl. Acad. Sci. USA, 87:6450-6454 (1990), each of which is incorporated herein by reference. In one embodiment using phage display technology, cDNA from an immunized transgenic mouse (e.g., total spleen cDNA) is isolated, the polymerase chain reaction is used to amplify a cDNA sequences that encode a portion of an immunoglobulin polypeptide, e.g., CDR regions, and the amplified sequences are inserted into a phage vector. cDNAs encoding peptides of interest, e.g., variable region peptides with desired binding characteristics are identified by standard techniques such as panning. The sequence of the amplified or cloned nucleic acid is then determined. Typically the sequence encoding an entire variable region of the immunoglobulin polypeptide is determined, however, it will sometimes be adequate to sequence only a portion of a variable region, for example, the CDR-encoding portion. Typically the portion sequenced will be at least 30 bases in length, more often based coding for at least about one-third or at least about one-half of the length of the variable region will be sequenced.

[3028] Sequencing can be carried out on clones isolated from a cDNA library, or, when PCR is used, after subcloning the amplified sequence or by direct PCR sequencing of the amplified segment. Sequencing is carried out using standard techniques (see, e.g., Sambrook et al. (1989) Molecular Cloning: A Laboratory Guide, Vols 1-3, Cold Spring Harbor Press, and Sanger, F. et al. (1977) Proc. Natl. Acad. Sci. USA 74: 5463-5467, which is incorporated herein by reference). By comparing the sequence of the cloned nucleic acid with published sequences of human immunoglobulin genes and cDNAs, one of skill will readily be able to determine, depending on the region sequenced, (i) the germline segment usage of the hybridoma immunoglobulin polypeptide (including the isotype of the heavy chain) and (ii) the sequence of the heavy and light chain variable regions, including sequences resulting from N-region addition and the process of somatic mutation. One source of immunoglobulin gene sequence information is the National Center for Biotechnology Information, National Library of Medicine, National Institutes of Health, Bethesda, Md.

[3029] Selection and Transformation of Host Cells

[3030] In one aspect, provided herein is a host cell that comprises the isolated nucleic acids described above or a vector comprising said isolated nucleic acids described above. The vector can be a cloning vector or an expression vector. Suitable host cells for cloning or expressing the DNA in the vectors herein are the prokaryote, yeast, or higher eukaryote cells described above. Suitable prokaryotes for this purpose include eubacteria, such as Gram-negative or Gram-positive organisms, for example, Enterobacteriaceae such as Escherichia, e.g., E. coli, Enterobacter, Erwinia, Klebsiella, Proteus, Salmonella, e.g., Salmonella typhimurium, Serratia, e.g., Serratia marcescens, and Shigella, as well as Bacilli such as B. subtilis and B. licheniformis (e.g., B. licheniformis 41 P disclosed in DD 266,710 published Apr. 12, 1989), Pseudomonas such as P. aeruginosa, and Streptomyces. One preferred E. coli cloning host is E. coli 294 (ATCC 31,446), although other strains such as E. coli B, E. coli X1776 (ATCC 31,537), and E. coli W3110 (ATCC 27,325) are suitable. These examples are illustrative rather than limiting.

[3031] In addition to prokaryotes, eukaryotic microbes such as filamentous fungi or yeast are suitable cloning or expression hosts for antibody-encoding vectors. Saccharomyces cerevisiae, or common baker's yeast, is the most commonly used among lower eukaryotic host microorganisms. However, a number of other genera, species, and strains are commonly available and useful herein, such as Schizosaccharomyces pombe; Kluyveromyces hosts such as, e.g., K. lactis, K. fragilis (ATCC 12,424), K. bulgaricus (ATCC 16,045), K. wickeramii (ATCC 24,178), K. waltii (ATCC 56,500), K. drosophilarum (ATCC 36,906), K. thermotolerans, and K. marxianus; yarrowia (EP 402,226); Pichia pastors (EP 183,070); Candida; Trichoderma reesia (EP 244,234); Neurospora crassa; Schwanniomyces such as Schwanniomyces occidentalis; and filamentous fungi such as, e.g., Neurospora, Penicillium, Tolypocladium, and Aspergillus hosts such as A. nidulans and A. niger.

[3032] Suitable host cells for the expression of glycosylated antibody are derived from multicellular organisms. Examples of invertebrate cells include plant and insect cells. Numerous baculoviral strains and variants and corresponding permissive insect host cells from hosts such as Spodoptera frugiperda (caterpillar), Aedes aegypti (mosquito), Aedes albopictus (mosquito), Drosophila melanogaster (fruitfly), and Bombyx mori have been identified. A variety of viral strains for transfection are publicly available, e.g., the L-1 variant of Autographa californica NPV and the Bm-5 strain of Bombyx mori NP\7, and such viruses may be used as the virus herein according to the present invention, particularly for transfection of Spodoptera frugiperda cells.

[3033] Plant cell cultures of cotton, corn, potato, soybean, petunia, tomato, tobacco, lemna, and other plant cells can also be utilized as hosts. However, interest has been greatest in vertebrate cells, and propagation of vertebrate cells in culture (tissue culture) has become routine procedure. Examples of useful mammalian host cell lines are Chinese hamster ovary cells, including CHOK1 cells (ATCC CCL61), DXB-11, DG-44, and Chinese hamster ovary cells/-DHFR (CHO, Urlaub et al., Proc. Natl. Acad. Sci. USA 77: 4216 (1980)); monkey kidney CV1 line transformed by SV40 (COS-7, ATCC CRL 1651); human embryonic kidney line (293 or 293 cells subcloned for growth in suspension culture, [Graham et al., J. Gen Viral. 36: 59 (1977)]; baby hamster kidney cells (BHK, ATCC CCL 10); mouse sertoli cells (TM4, Mather, Biol. Reprod. 23: 243-251 (1980)); monkey kidney cells (CV1 ATCC CCL 70); African green monkey kidney cells (VERO-76, ATCC CRL-1587); human cervical carcinoma cells (HELA, ATCC CCL 2); canine kidney cells (MDCK, ATCC CCL 34); buffalo rat liver cells (BRL 3A, ATCC CRL 1442); human lung cells (W138, ATCC CCL 75); human liver cells (Hep G2, HB 8065); mouse mammary tumor (MMT 060562, ATCC CCL51); TRI cells (Mather et al., Annals N.Y Acad. Sci. 383: 44-68 (1982)); MRC 5 cells; FS4 cells; and a human hepatoma line (Hep G2). Host cells are transformed or transfected with the above-described expression or cloning vectors for antibody production and cultured in conventional nutrient media modified as appropriate for inducing promoters, selecting transformants, or amplifying the genes encoding the desired sequences. In addition, novel vectors and transfected cell lines with multiple copies of transcription units separated by a selective marker are particularly useful and preferred for the expression of antibodies, described herein.

[3034] For transfection of the expression vectors and production of the chimeric, humanized, or composite human antibodies described herein, the recipient cell line can be a myeloma cell. Myeloma cells can synthesize, assemble and secrete immunoglobulins encoded by transfected immunoglobulin nucleic acid sequences and possess the mechanism for glycosylation of the immunoglobulin. For example, in some embodiments, the recipient cell is the recombinant Ig-producing myeloma cell SP2/0 (ATCC #CRL 8287). SP2/0 cells produce only immunoglobulin encoded by the transfected genes. Myeloma cells can be grown in culture or in the peritoneal cavity of a mouse, where secreted immunoglobulin can be obtained from ascites fluid. Other suitable recipient cells include lymphoid cells such as B lymphocytes of human or non-human origin, hybridoma cells of human or non-human origin, or interspecies heterohybridoma cells. An expression vector carrying a chimeric, humanized, or composite human antibody construct or antibody polypeptide described herein can be introduced into an appropriate host cell by any of a variety of suitable means, including such biochemical means as transformation, transfection, conjugation, protoplast fusion, calcium phosphate-precipitation, and application with polycations such as diethylaminoethyl (DEAE) dextran, and such mechanical means as electroporation, direct microinjection, and microprojectile bombardment. Johnston et al., 240 Science 1538 (1988), as known to one of ordinary skill in the art.

[3035] Yeast provides certain advantages over bacteria for the production of immunoglobulin H and L chains. Yeasts carry out post-translational peptide modifications including glycosylation. A number of recombinant DNA strategies exist that utilize strong promoter sequences and high copy number plasmids which can be used for production of the desired proteins in yeast. Yeast recognizes leader sequences of cloned mammalian gene products and secretes peptides bearing leader sequences (i.e., pre-peptides). Hitzman et al., 11th Intl. Conf. Yeast, Genetics & Molec. Biol. (Montpelier, France, 1982). Yeast gene expression systems can be routinely evaluated for the levels of production, secretion and the stability of antibody polypeptide or antigen-binding fragment peptide thereof, and assembled chimeric, humanized, or composite human antibodies, fragments and regions thereof. Any of a series of yeast gene expression systems incorporating promoter and termination elements from the actively expressed genes coding for glycolytic enzymes produced in large quantities when yeasts are grown in media rich in glucose can be utilized. Known glycolytic genes can also provide very efficient transcription control signals. For example, the promoter and terminator signals of the phosphoglycerate kinase (PGK) gene can be utilized. A number of approaches can be taken for evaluating optimal expression plasmids for the expression of cloned immunoglobulin cDNAs in yeast.

[3036] Bacterial strains can also be utilized as hosts for the production of the antibody molecules or fragments thereof described herein, E. coli K12 strains such as E. coli W3110 (ATCC 27325), Bacillus species, enterobacteria such as Salmonella typhimurium or Serratia marcescens, and various Pseudomonas species can be used. Plasmid vectors containing replicon and control sequences which are derived from species compatible with a host cell are used in connection with these bacterial hosts. The vector carries a replication site, as well as specific genes which are capable of providing phenotypic selection in transformed cells. A number of approaches can be taken for evaluating the expression plasmids for the production of chimeric, humanized, or composite humanized antibodies and fragments thereof encoded by the cloned immunoglobulin cDNAs or CDRs in bacteria (see Glover, 1985; Ausubel, 1987, 1993; Sambrook, 1989; Colligan, 1992-1996).

[3037] Host mammalian cells can be grown in vitro or in vivo. Mammalian cells provide post-translational modifications to immunoglobulin protein molecules including leader peptide removal, folding and assembly of H and L chains, glycosylation of the antibody molecules, and secretion of functional antibody protein. Mammalian cells which can be useful as hosts for the production of antibody proteins, in addition to the cells of lymphoid origin described above, include cells of fibroblast origin, such as Vero (ATCC CRL 81) or CHO-K1 (ATCC CRL 61) cells. Exemplary eukaryotic cells that can be used to express polypeptides include, but are not limited to, COS cells, including COS 7 cells; 293 cells, including 293-6E cells; CHO cells, including CHO-S and DG44 cells; PER.C6® cells (Crucell); and NSO cells. In some embodiments, a particular eukaryotic host cell is selected based on its ability to make desired post-translational modifications to the variable heavy chains and/or variable light chains. For example, in some embodiments, CHO cells produce polypeptides that have a higher level of sialylation than the same polypeptide produced in 293 cells.

[3038] In some embodiments, polypeptides of the antibodies or antigen-binding fragment thereof, disclosed herein can be produced in vivo in an animal that has been engineered or transfected with one or more nucleic acid molecules encoding the polypeptides, according to any suitable method. In some embodiments, an antibody or antigen-binding fragment thereof is produced in a cell-free system. Non-limiting exemplary cell-free systems are described, e.g., in Sitaraman et al., Methods Mol. Biol. 498: 229-44 (2009); Spirin, Trends Biotechnol. 22: 538-45 (2004); and Endo et al., Biotechnol. Adv. 21: 695-713 (2003).

[3039] Many vector systems are available for the expression of H and L chain nucleic acid sequence in mammalian cells (see Glover, 1985). Different approaches can be followed to obtain complete H2L2 antibodies. As discussed above, it is possible to co-express H and L chains in the same cells to achieve intracellular association and linkage of H and L chains into complete tetrameric H2L2 antibodies and/or antigen-binding fragment peptides. The co-expression can occur by using either the same or different plasmids in the same host. Genes for both H and L chains and/or CDR3 regions peptides can be placed into the same plasmid, which is then transfected into cells, thereby selecting directly for cells that express both chains. Alternatively, cells can be transfected first with a plasmid encoding one chain, for example the L chain, followed by transfection of the resulting cell line with an H chain plasmid containing a second selectable marker. Cell lines producing antigen-binding peptide fragments and/or H2L2molecules via either route could be transfected with plasmids encoding additional copies of peptides, H, L, or H plus L chains in conjunction with additional selectable markers to generate cell lines with enhanced properties, such as higher production of assembled H2L2 antibody molecules or enhanced stability of the transfected cell lines.

[3040] Additionally, plants have emerged as a convenient, safe and economical alternative main-stream expression systems for recombinant antibody production, which are based on large scale culture of microbes or animal cells. Antibodies can be expressed in plant cell culture, or plants grown conventionally. The expression in plants may be systemic, limited to sub-cellular plastids, or limited to seeds (endosperms). Several plant-derived antibodies have reached advanced stages of development (see, e.g., Biolex, NC).

[3041] In some aspects, provided herein are methods and systems for the production of a humanized antibody, which is prepared by a process which comprises maintaining a host transformed with a first expression vector which encodes the light chain of the humanized antibody and with a second expression vector which encodes the heavy chain of the humanized antibody under such conditions that each chain is expressed and isolating the humanized antibody formed by assembly of the thus-expressed chains. The first and second expression vectors can be the same vector. Also provided herein are DNA sequences encoding the light chain or the heavy chain of the humanized antibody; an expression vector which incorporates a said DNA sequence; and a host transformed with a said expression vector. Generating a humanized antibody from the sequences and information provided herein can be practiced by those of ordinary skill in the art without undue experimentation. In one approach, there are four general steps employed to humanize a monoclonal antibody. These are: (1) determining the nucleotide and predicted amino acid sequence of the starting antibody light and heavy variable domains; (2) designing the humanized antibody, i.e., deciding which antibody framework region to use during the humanizing process; (3) the actual humanizing methodologies/techniques; and (4) the transfection and expression of the humanized antibody.

### Library-Derivation

[3042] Antibodies or antigen-binding fragment thereof of the present disclosure may be isolated by screening combinatorial libraries for antibodies with the desired activity or activities. (See, e.g., in Hoogenboom et al., Methods in Molecular Biology 178:1-37 (2001); McCafferty et al., Nature 348:552-554; Clackson et al., Nature 352: 624-628 (1991); Marks et al., J. Mol. Biol. 222: 581-597 (1992); Marks and Bradbury, Methods in Molecular Biology 248:161-175 (2003); Sidhu et al., J. Mol. Biol. 338(2): 299-310 (2004); Lee et al., J. Mol. Biol. 340(5): 1073-1093 (2004); Fellouse, Proc. Natl. Acad. Sci. USA 101(34): 12467-12472 (2004); and Lee et al., J. Immunol. Methods 284(1-2): 119-132 (2004)). Repertoires of VH and VL genes can be cloned separately (e.g., by PCR) and recombined randomly in libraries (e.g., phage libraries), and screened (See, e.g., Winter et al., Ann. Rev. Immunol., 12: 433-455 (1994)). Alternatively, the naive repertoire can be cloned (e.g., from human) to provide a single source of antibodies to a wide range of non-self and also self-antigens without any immunization (See, e.g., Griffiths et al., EMBO J, 12: 725-734 (1993). Alternatively, naive libraries can be synthetically made by cloning unrearranged V-gene segments from stem cells, and encoding the CDR3 regions using random primers or to rearrange the V-gene segments in vitro (See, e.g., Hoogenboom and Winter, J. Mol. Biol., 227: 381-388 (1992)). Antibodies or antibody fragments isolated from human antibody libraries are considered human antibodies or human antibody fragments herein.

### Fusion Proteins

[3043] In one aspect, provided herein is a fusion protein comprising an antibody or an antigen-binding fragment, disclosed herein. In some embodiments, fusion protein comprises one or more antibody or antigen-binding fragment thereof, disclosed herein, and an immunomodulator or toxin moiety. Methods of making antibody fusion proteins are known. Antibody fusion proteins comprising an interleukin-2 moiety are described by Boleti et al., Ann. Oneal. 6:945 (1995), Nicolet et al., Cancer Gene Ther. 2:161 (1995), Becker et al., Proc. Natl Acad. Sci. USA 93:7826 (1996), Hank et al., Clin. Cancer Res. 2:1951 (1996), and Hu et al., Cancer Res. 56:4998 (1996). In addition, Yang et al., Hum. Antibodies Hybridomas 6:129 (1995), describe a fusion protein that includes an F(ab′)2 fragment and a tumor necrosis factor alpha moiety.

[3044] Methods of making antibody-toxin fusion proteins in which a recombinant molecule comprises one or more antibody components and a toxin or chemotherapeutic agent also are known to those of skill in the art. For example, antibody-Pseudomonas exotoxin A fusion proteins have been described by Chaudhary et al., Nature 339:394 (1989), Brinkmann et al., Proc. Nat'l Acad. Sci. USA 88:8616 (1991), Batra et al., Proc. Natl Acad. Sci. USA 89:5867 (1992), Friedman et al., J. Immunol. 150:3054 (1993), Weis et al., Int. J. Can. 60:137 (1995), Fominaya et al., J. Biol. Chem. 271:10560 (1996), Kuan et al., Biochemistry 35:2872 (1996), and Schmidt et al., Int. J. Can. 65:538 (1996). Antibody-toxin fusion proteins containing a diphtheria toxin moiety have been described by Kreitman et al., Leukemia 7:553 (1993), Nicholls et al., J. Biol. Chem. 268:5302 (1993), Thompson et al., J. Biol. Chem. 270:28037 (1995), and Vallera et al., Blood 88:2342 (1996). Deonarain et al., Tumor Targeting 1:177 (1995), have described an antibody-toxin fusion protein having an RNase moiety, while Linardou et al., Cell Biophys. 24-25:243 (1994), produced an antibody-toxin fusion protein comprising a DNase I component. Gelonin was used as the toxin moiety in the antibody-toxin fusion protein of Wang et al., Abstracts of the 209th ACS National Meeting, Anaheim, Calif., Apr. 2-6, 1995, Part 1, BIOT005. As a further example, Dohlsten et al., Proc. Natl Acad. Sci. USA 91:8945 (1994), reported an antibody-toxin fusion protein comprising Staphylococcal enterotoxin-A.

[3045] Illustrative of toxins which are suitably employed in the preparation of such conjugates are ricin, abrin, ribonuclease, DNase I, Staphylococcal enterotoxin-A, pokeweed antiviral protein, gelonin, diphtheria toxin, Pseudomonas exotoxin, and Pseudomonas endotoxin. See, for example, Pastan et al., Cell 47:641 (1986), and Goldenberg, C A-A Cancer Journal for Clinicians 44:43 (1994). Other suitable toxins are known to those of skill in the art.

[3046] Antibodies or antigen-binding fragment thereof, disclosed herein, may also be used in ADEPT by conjugating the antibody to a prodrug-activating enzyme which converts a prodrug (e.g., a peptidyl chemotherapeutic agent, see, WO 81/01145) to an active anti-cancer drug. See, for example, WO 88/07378 and U.S. Pat. No. 4,975,278. The enzyme component of the immunoconjugate useful for ADEPT includes any enzyme capable of acting on a prodrug in such a way so as to convert it into its more active, cytotoxic form.

[3047] Enzymes that are useful in the method of this invention include, but are not limited to, alkaline phosphatase useful for converting phosphate-containing prodrugs into free drugs; arylsulfatase useful for converting sulfate-containing prodrugs into free drugs; cytosine deaminase useful for converting non-toxic 5-fluorocytosine into the anti-cancer drug, 5-fluorouracil; proteases, such as serratia protease, thermolysin, subtilisin, carboxypeptidases and cathepsins (such as cathepsins B and L), that are useful for converting peptide-containing prodrugs into free drugs; D-alanylcarboxypeptidases, useful for converting prodrugs that contain D-amino acid substituents; carbohydrate-cleaving enzymes such as galactosidase and neuraminidase useful for converting glycosylated prodrugs into free drugs; lactamase useful for converting drugs derivatized with lactams into free drugs; and penicillin amidases, such as penicillin V amidase or penicillin G amidase, useful for converting drugs derivatized at their amine nitrogens with phenoxyacetyl or phenylacetyl groups, respectively, into free drugs. Alternatively, antibodies with enzymatic activity, also known in the art as abzymes, can be used to convert the prodrugs of the invention into free active drugs (See, e.g., Massey, Nature 328: 457-458 (1987)). Antibody-abzyme conjugates can be prepared as described herein for delivery of the abzyme to a tumor cell population.

[3048] The enzymes of this invention can be covalently bound to the antibodies by techniques well known in the art such as the use of the heterobifunctional crosslinking reagents discussed above. Alternatively, fusion proteins comprising at least the antigen-binding region of an antibody of the invention linked to at least a functionally active portion of an enzyme of the invention can be constructed using recombinant DNA techniques well known in the art (See, e.g., Neuberger et al., Nature 312: 604-608 (1984)).

### Chimeric Antigen Receptors

[3049] In one aspect, the disclosure herein, provides a chimeric antigen receptor comprising, an antigen-binding fragment, disclosed herein, a transmembrane domain, and an intracellular signaling domain. The term “chimeric Antigen Receptor” (CAR), “artificial T cell receptor”, “chimeric T cell receptor”, or “chimeric immunoreceptor” as used herein refers to an engineered receptor, which grafts an arbitrary specificity onto an immune effector cell. CARs typically have an extracellular domain (ectodomain), which comprises an antigen-binding domain, a transmembrane domain, and an intracellular (endodomain) domain. The term “signaling domain” refers to the functional portion of a protein which acts by transmitting information within the cell to regulate cellular activity via defined signaling pathways by generating second messengers or functioning as effectors by responding to such messengers.

[3050] An “intracellular signaling domain,” as the term is used herein, refers to an intracellular portion of a molecule. The intracellular signaling domain generates a signal that promotes an immune effector function of the CAR containing cell, e.g., a CART cell. Examples of immune effector function, e.g., in a CART cell, include cytolytic activity and helper activity, including the secretion of cytokines. In an embodiment, the intracellular signaling domain can comprise a primary intracellular signaling domain. Exemplary primary intracellular signaling domains include those derived from the molecules responsible for primary stimulation, or antigen dependent simulation. In an embodiment, the intracellular signaling domain can comprise a costimulatory intracellular domain. Exemplary costimulatory intracellular signaling domains include those derived from molecules responsible for costimulatory signals, or antigen independent stimulation. For example, in the case of a CART, a primary intracellular signaling domain can comprise a cytoplasmic sequence of a T cell receptor, and a costimulatory intracellular signaling domain can comprise cytoplasmic sequence from co-receptor or costimulatory molecule.

[3051] A primary intracellular signaling domain can comprise a signaling motif which is known as an immunoreceptor tyrosine-based activation motif or ITAM. Examples of ITAM-containing primary cytoplasmic signaling sequences include, but are not limited to, those derived from CD3 zeta, FcR gamma, FcR beta, CD3 gamma, CD3 delta, CD3 epsilon, CD5, CD22, CD79a, CD79b, and CD66d DAP10 and DAP12.

[3052] The term “zeta” or alternatively “zeta chain”, “CD3-zeta” or “TCR-zeta” is defined as the protein provided as GenBank Acc. No. BAG36664.1, or the equivalent residues from a non-human species, e.g., mouse, rodent, monkey, ape and the like, and a “zeta stimulatory domain” or alternatively a “CD3-zeta stimulatory domain” or a “TCR-zeta stimulatory domain” is defined as the amino acid residues from the cytoplasmic domain of the zeta chain that are sufficient to functionally transmit an initial signal necessary for T cell activation. In one aspect the cytoplasmic domain of zeta comprises residues 52 through 164 of GenBank Acc. No. BAG36664.1 or the equivalent residues from a non-human species, e.g., mouse, rodent, monkey, ape and the like, that are functional orthologs thereof.

[3053] The term “costimulatory molecule” refers to the cognate binding partner on a T cell that specifically binds with a costimulatory ligand, thereby mediating a costimulatory response by the T cell, such as, but not limited to, proliferation. Costimulatory molecules are cell surface molecules other than antigen receptors or their ligands that are required for an efficient immune response. Costimulatory molecules include, but are not limited to, an MHC class I molecule, BTLA and a Toll ligand receptor, as well as OX40, CD2, CD27, CD28, CD5, ICAM-1, LFA-1 (CD11a/CD18) and 4-1BB (CD137). A costimulatory intracellular signaling domain can be derived from the intracellular portion of a costimulatory molecule. A costimulatory molecule can be represented in the following protein families: TNF receptor proteins, Immunoglobulin-like proteins, cytokine receptors, integrins, signaling lymphocytic activation molecules (SLAM proteins), and activating NK cell receptors. Examples of such molecules include CD27, CD28, 4-1BB (CD137), OX40, GITR, CD30, CD40, ICOS, BAFFR, HVEM, lymphocyte function-associated antigen-1 (LFA-1), CD2, CD7, LIGHT, NKG2C, SLAMF7, NKp80, CD160, B7-H3, and a ligand that specifically binds with CD83, and the like. The intracellular signaling domain can comprise the entire intracellular portion, or the entire native intracellular signaling domain, of the molecule from which it is derived, or a functional fragment thereof.

[3054] In another aspect, the antigen binding fragment comprises a humanized antibody or antibody fragment. In one embodiment, the antigen binding fragment comprises one or more (e.g., one, two, or all three) light chain complementary determining region 1 (CDR-L1), light chain complementary determining region 2 (CDR-L2), and light chain complementary determining region 3 (CDR-L3) of an antibody described herein, and one or more (e.g., one, two, or all three) heavy chain complementary determining region 1 (CDR-H1), heavy chain complementary determining region 2 (CDR-H2), and heavy chain complementary determining region 3 (CDR-H3) of an antibody described herein. In one embodiment, the CDR-L1 comprises a sequence selected from any one of SEQ ID NOS: 814-1084. In one embodiment, the CDR-L2 comprises a sequence selected from any one of SEQ ID NOS: 1356-1626. In one embodiment, the CDR-L3 comprises a sequence selected from any one of SEQ ID NOS: 1898-2168. In one embodiment, the CDR-H1 comprises a sequence selected from any one of SEQ ID NOS: 543-813. In one embodiment, the CDR-H2 comprises a sequence selected from any one of SEQ ID NOS: 1085-1355. In one embodiment, the CDR-H3 comprises a sequence selected from any one of SEQ ID NOS: 1627-1897. In one embodiment, the antigen-binding fragment comprises a light chain variable region described herein and/or a heavy chain variable region described herein. In some embodiments, the light chain variable region comprises a sequence selected from any one of SEQ ID NOS: 272-542. In some embodiments, the heavy chain variable region comprises a sequence selected from any one of SEQ ID NOS: 1-271. In one embodiment, the antigen-binding fragment is a scFv comprising a light chain variable region and a heavy chain variable region of an amino acid sequence, e.g., a light chain variable region and heavy chain variable region described herein. In an embodiment, the antigen-binding fragment (e.g., an scFv) comprises: a light chain variable region comprising an amino acid sequence having at least one, two or three modifications (e.g., substitutions) but not more than 30, 20 or 10 modifications (e.g., substitutions) of an amino acid sequence of a light chain variable region provided herein, or a sequence with 85-99% (e.g., 90-99%, or 95-99%) identity to an amino acid sequence provided herein; and/or a heavy chain variable region comprising an amino acid sequence having at least one, two or three modifications (e.g., substitutions) but not more than 30, 20 or 10 modifications (e.g., substitutions) of an amino acid sequence of a heavy chain variable region provided herein, or a sequence with 85-99% (e.g., 90-99%, or 95-99%) identity to an amino acid sequence provided herein.

### Transmembrane Domain

[3055] With respect to the transmembrane domain, in various embodiments, a CAR can be designed to comprise a transmembrane domain that is attached to the extracellular domain of the CAR. A transmembrane domain can include one or more additional amino acids adjacent to the transmembrane region, e.g., one or more amino acid associated with the extracellular region of the protein from which the transmembrane was derived (e.g., 1, 2, 3, 4, 5, 6, 7, 8, 9, 10 up to 15 amino acids of the extracellular region) and/or one or more additional amino acids associated with the intracellular region of the protein from which the transmembrane protein is derived (e.g., 1, 2, 3, 4, 5, 6, 7, 8, 9, 10 up to 15 amino acids of the intracellular region). In one aspect, the transmembrane domain is one that is associated with one of the other domains of the CAR is used. In some instances, the transmembrane domain can be selected or modified by amino acid substitution to avoid binding of such domains to the transmembrane domains of the same or different surface membrane proteins, e.g., to minimize interactions with other members of the receptor complex. In one aspect, the transmembrane domain is capable of homodimerization with another CAR on the CART cell surface. In a different aspect, the amino acid sequence of the transmembrane domain may be modified or substituted so as to minimize interactions with the binding domains of the native binding partner present in the same CAR T.

[3056] The transmembrane domain may be derived either from a natural or from a recombinant source. Where the source is natural, the domain may be derived from any membrane-bound or transmembrane protein. In one aspect the transmembrane domain is capable of signaling to the intracellular domain(s) whenever the CAR has bound to a target. A transmembrane domain, for example, can include at least the transmembrane region(s) of e.g., the alpha, beta or zeta chain of the T-cell receptor, CD28, CD3 epsilon, CD45, CD4, CD5, CD8, CD9, CD16, CD22, CD33, CD37, CD64, CD80, CD86, CD134, CD137, CD154. In some instances, the transmembrane domain can be attached to the extracellular region of the CAR, e.g., the antigen-binding domain of the CAR, via a hinge, e.g., a hinge from a human protein. For example, in one embodiment, the hinge can be a human Ig (immunoglobulin) hinge, e.g., an IgG4 hinge, or a CD8a hinge. In one aspect, the hinge or spacer comprises an IgG4 hinge.

### Cytoplasmic Domain

[3057] The cytoplasmic domain or region of the CAR includes an intracellular signaling domain. An intracellular signaling domain is generally responsible for activation of at least one of the normal effector functions of the immune cell in which the CAR has been introduced. The term “effector function” refers to a specialized function of a cell. Effector function of a T cell, for example, may be cytolytic activity or helper activity including the secretion of cytokines. Thus the term “intracellular signaling domain” refers to the portion of a protein which transduces the effector function signal and directs the cell to perform a specialized function. While usually the entire intracellular signaling domain can be employed, in many cases it is not necessary to use the entire chain. To the extent that a truncated portion of the intracellular signaling domain is used, such truncated portion may be used in place of the intact chain as long as it transduces the effector function signal. The term intracellular signaling domain is thus meant to include any truncated portion of the intracellular signaling domain sufficient to transduce the effector function signal. Examples of intracellular signaling domains for use in the CAR of the invention include the cytoplasmic sequences of the T cell receptor (TCR) and co-receptors that act in concert to initiate signal transduction following antigen receptor engagement, as well as any derivative or variant of these sequences and any recombinant sequence that has the same functional capability.

[3058] It is known that signals generated through the TCR alone are insufficient for full activation of the T cell and that a secondary and/or costimulatory signal is also required. Thus, T cell activation can be said to be mediated by two distinct classes of cytoplasmic signaling sequences: those that initiate antigen-dependent primary activation through the TCR (primary intracellular signaling domains) and those that act in an antigen-independent manner to provide a secondary or costimulatory signal (secondary cytoplasmic signaling domain, e.g., a costimulatory domain). A primary signaling domain regulates primary activation of the TCR complex either in a stimulatory way, or in an inhibitory way. Primary intracellular signaling domains that act in a stimulatory manner may contain signaling motifs which are known as immunoreceptor tyrosine-based activation motifs or ITAMs.

[3059] Examples of ITAM containing primary intracellular signaling domains that are of particular use in the invention include those of TCR zeta, FcR gamma, FcR beta, CD3 gamma, CD3 delta, CD3 epsilon, CD5, CD22, CD79a, CD79b, and CD66d. In one embodiment, a CAR of the invention, e.g., a CAR comprises a intracellular signaling domain, e.g., a primary signaling domain, of CD3-zeta. In one embodiment, a primary signaling domain comprises a modified ITAM domain, e.g., a mutated ITAM domain which has altered (e.g., increased or decreased) activity as compared to the native ITAM domain. In one embodiment, a primary signaling domain comprises a modified ITAM-containing primary intracellular signaling domain, e.g., an optimized and/or truncated ITAM-containing primary intracellular signaling domain. In an embodiment, a primary signaling domain comprises one, two, three, four or more ITAM motifs.

[3060] The intracellular signaling domain of the CAR can comprise the CD3-zeta signaling domain by itself or it can be combined with any other desired intracellular signaling domain(s) useful in the context of a CAR of the invention. For example, the intracellular signaling domain of the CAR can comprise a CD3 zeta chain portion and a costimulatory signaling domain. The costimulatory signaling domain refers to a portion of the CAR comprising the intracellular domain of a costimulatory molecule. A costimulatory molecule is a cell surface molecule other than an antigen receptor or its ligands that is required for an efficient response of lymphocytes to an antigen. Examples of such molecules include CD27, CD28, 4-1BB (CD137), OX40, CD30, CD40, PD-1, ICOS, lymphocyte function-associated antigen-1 (LFA-1), CD2, CD7, LIGHT, NKG2C, B7-H3, and a ligand that specifically binds with CD83, and the like. For example, CD27 costimulation has been demonstrated to enhance expansion, effector function, and survival of human CART cells in vitro and augments human T cell persistence and antitumor activity in vivo (Song et al. Blood. 2012; 119(3):696-706). The intracellular signaling sequences within the cytoplasmic portion of a CAR of the invention may be linked to each other in a random or specified order. Optionally, a short oligo- or polypeptide linker, for example, between 2 and 10 amino acids (e.g., 2, 3, 4, 5, 6, 7, 8, 9, or 10 amino acids) in length may form the linkage between intracellular signaling sequence. In one embodiment, a glycine-serine doublet can be used as a suitable linker. In one embodiment, a single amino acid, e.g., an alanine, a glycine, can be used as a suitable linker.

[3061] In one aspect, the intracellular signaling domain is designed to comprise two or more, e.g., 2, 3, 4, 5, or more, costimulatory signaling domains. In an embodiment, the two or more, e.g., 2, 3, 4, 5, or more, costimulatory signaling domains, are separated by a linker molecule, e.g., a linker molecule described herein. In one embodiment, the intracellular signaling domain comprises two costimulatory signaling domains. In some embodiments, the linker molecule is a glycine residue. In some embodiments, the linker is an alanine residue. In some embodiments, CAR does not actually recognize the entire antigen; instead it binds to only a portion of the antigen's surface, an area called the antigenic determinant or epitope. In some embodiments, a CAR described herein include (including functional portions and functional variants thereof) glycosylated, amidated, carboxylated, phosphorylated, esterified, N-acylated, cyclized via, e.g., a disulfide bridge, or converted into an acid addition salt and/or optionally dimerized or polymerized, or conjugated.

### T Cell Receptor Fusion Proteins (TFP)

[3062] As used herein, a “T-cell receptor (TCR) fusion protein” or “TFP” includes a recombinant polypeptide derived from the various polypeptides comprising the TCR that is generally capable of i) binding to a surface antigen on target cells and ii) interacting with other polypeptide components of the intact TCR complex, typically when co-located in or on the surface of a T-cell. Non-limiting examples of TFPs are illustrated in FIGS. 9-12.

[3063] In one aspect provided herein is an isolated TFP molecule that comprises a human or humanized anti-cancer antigen (anti-Cag) binding domain, a TCR extracellular domain, a transmembrane domain, and an intracellular signaling domain. In some embodiments, the TFP molecule is capable of functionally interacting with an endogenous TCR complex and/or at least one endogenous TCR polypeptide. In some instances, the anti-CAg binding domain is a scFv or a VH domain. In some instances, the anti-CAg binding domain comprises a heavy chain with 95-100% identity to an amino acid sequence of SEQ ID NOs: 1-271, a functional fragment thereof, or an amino acid sequence thereof having at least one but not more than 30 modifications. In some instances, the anti-CAg binding domain comprises a light chain with 95-100% identity to an amino acid sequence of SEQ ID NOs: 272-542, a functional fragment thereof, or an amino acid sequence thereof having at least one but not more than 30 modifications. In some instances, the isolated TFP molecule comprises a TCR extracellular domain that comprises an extracellular domain or portion thereof of a protein selected from the group consisting of a TCR alpha chain, a TCR beta chain, a CD3 epsilon TCR subunit, a CD3 gamma TCR subunit, a CD3 delta TCR subunit, functional fragments thereof, and amino acid sequences thereof having at least one but not more than 20 modifications. In some instances, the anti-CAg binding domain is connected to the TCR extracellular domain by a linker sequence. In some instances, the linker region comprises (G4S)n, wherein n=1 to 4.

[3064] In one aspect, provided herein is a vector that comprises a nucleic acid molecule encoding a TFP provided herein. In some instances, the vector is selected from the group consisting of a DNA, a RNA, a plasmid, a lentivirus vector, adenoviral vector, a Rous sarcoma viral (RSV) vector, or a retrovirus vector. In some instances, the vector further comprises a promoter. In some instances, the vector is an in vitro transcribed vector. In some instances, a nucleic acid sequence in the vector further comprises a poly(A) tail. In some instances, a nucleic acid sequence in the vector further comprises a 3′UTR.

[3065] In one aspect, provided herein is a cell that comprises a vector provided herein. In some instances, the cell is a human T-cell. In some instances, the T-cell is a CD8+ or CD4+ T-cell. In some instances, the cell further comprises a nucleic acid encoding an inhibitory molecule that comprises a first polypeptide that comprises at least a portion of an inhibitory molecule, associated with a second polypeptide that comprises a positive signal from an intracellular signaling domain. In some instances, the inhibitory molecule comprise first polypeptide that comprises at least a portion of PD1 and a second polypeptide comprising a costimulatory domain and primary signaling domain.

[3066] In one aspect, provided herein is a human CD8+ or CD4+ T-cell that comprises at least two TFP molecules, the TFP molecules comprising a human or humanized anti-CAg binding domain, a TCR extracellular domain, a transmembrane domain, and an intracellular domain, wherein the TFP molecule is capable of functionally interacting with an endogenous TCR complex and/or at least one endogenous TCR polypeptide in, at and/or on the surface of the human CD8+ or CD4+ T-cell.

[3067] In one aspect, provided herein is a protein complex that comprises: a TFP molecule comprising a human or humanized anti-CAg binding domain, a TCR extracellular domain, a transmembrane domain, and an intracellular domain; and at least one endogenous TCR complex.

[3068] In some instances, the TCR comprises an extracellular domain or portion thereof of a protein selected from the group consisting of TCR alpha chain, a TCR beta chain, a CD3 epsilon TCR subunit, a CD3 gamma TCR subunit, and a CD3 delta TCR subunit. In some instances, the anti-CAg binding domain is connected to the TCR extracellular domain by a linker sequence. In some instances, the linker region comprises (G4S)n, wherein n=1 to 4. In some instances, the disease associated with the cancer antigen expression is selected from the group consisting of a proliferative disease, a cancer, a malignancy, myelodysplasia, a myelodysplastic syndrome, a preleukemia, a non-cancer related indication associated with expression of the cancer antigen. In some instances, the disease is a cancer or a metastasis thereof. In some instances, the cells expressing a TFP molecule are administered in combination with an agent that increases the efficacy of a cell expressing a TFP molecule.

[3069] In one aspect, an isolated nucleic acid molecule provided herein, an isolated polypeptide molecule provided herein, an isolated TFP provided herein, a complex provided herein, a vector provided herein, or a cell provided herein, is for use as a medicament.

[3070] The term “stimulation” refers to a primary response induced by binding of a stimulatory domain or stimulatory molecule (e.g., a TCR/CD3 complex) with its cognate ligand thereby mediating a signal transduction event, such as, but not limited to, signal transduction via the TCR/CD3 complex. Stimulation can mediate altered expression of certain molecules, and/or reorganization of cytoskeletal structures, and the like. Methods of making, expressing and isolating TFPs are known in the art in, for example, U.S. Pre-Grant Publication No. 20170166622 A1, which methods are hereby incorporated by reference.

### Antigen-Binding Domain

[3071] In one aspect, the TFP of the invention comprises a target-specific binding element otherwise referred to as an antigen-binding domain. The choice of moiety depends upon the type and number of target antigen that define the surface of a target cell. For example, the antigen-binding domain may be chosen to recognize a target antigen that acts as a cell surface marker on target cells associated with a particular disease state. Thus examples of cell surface markers that may act as target antigens for the antigen-binding domain in a TFP of the invention include those associated with cancerous diseases (e.g., malignant diseases).

[3072] In one aspect, the TFP-mediated T-cell response can be directed to an antigen of interest by way of engineering an antigen-binding domain into the TFP that specifically binds a desired antigen. In one aspect, the portion of the TFP comprising the antigen-binding domain comprises an antigen-binding domain that targets a cancer antigen (CAg). In one aspect, the antigen-binding domain targets human CAg. The antigen-binding domain can be any domain that binds to the CAg including but not limited to a monoclonal antibody, a polyclonal antibody, a recombinant antibody, a human antibody, a humanized antibody, and a functional fragment thereof, including but not limited to a single-domain antibody such as a heavy chain variable domain (VH), a light chain variable domain (VL) and a variable domain (VHH) of a camelid derived nanobody, and to an alternative scaffold known in the art to function as antigen-binding domain, such as a recombinant fibronectin domain, anticalin, DARPIN, and the like. Likewise a natural or synthetic ligand specifically recognizing and binding the target CAg can be used as antigen-binding domain for the TFP. In some instances, it is beneficial for the antigen-binding domain to be derived from the same species in which the TFP will ultimately be used in. For example, for use in humans, it may be beneficial for the antigen-binding domain of the TFP to comprise human or humanized residues for the antigen-binding domain of an antibody or antibody fragment.

[3073] The portion of the TFP composition of the invention comprising an antibody or antibody fragment thereof may exist in a variety of forms where the antigen-binding domain is expressed as part of a contiguous polypeptide chain including, for example, a single domain antibody fragment (sdAb), a single chain antibody (scFv) derived from a murine, humanized or human antibody (Harlow et al., 1999, In: Using Antibodies: A Laboratory Manual, Cold Spring Harbor Laboratory Press, N.Y.; Harlow et al., 1989, In: Antibodies: A Laboratory Manual, Cold Spring Harbor, N.Y.; Houston et al., 1988, Proc. Natl. Acad. Sci. USA 85:5879-5883; Bird et al., 1988, Science 242:423-426). In one aspect, the antigen-binding domain of a TFP composition of the invention comprises an antibody fragment. In a further aspect, the TFP comprises an antibody fragment that comprises a scFv or a sdAb.

[3074] In another aspect, the antigen-binding domain comprises a humanized antibody or antigen-binding domain. In one embodiment, the antigen-binding domain comprises one or more (e.g., one, two, or all three) light chain complementary determining region 1 (CDR-L1), light chain complementary determining region 2 (CDR-L2), and light chain complementary determining region 3 (CDR-L3) of an antibody described herein, and one or more (e.g., one, two, or all three) heavy chain complementary determining region 1 (CDR-H1), heavy chain complementary determining region 2 (CDR-H2), and heavy chain complementary determining region 3 (CDR-H3) of an antibody described herein. In some embodiments, the CDR-H1 comprises a sequence selected from any one of SEQ ID NOs: 543-813. In some embodiments, the CDR-H2 comprises a sequence selected from any one of SEQ ID NOs: 1085-1355. In some embodiments the CDR-H3 comprises a sequence selected from any one of SEQ ID NOS: 1627-1897. In some embodiments, the CDR-L1 comprises a sequence selected from any one of SEQ ID NOs: 814-1084. In some embodiments, the CDR-L2 comprises a sequence selected from any one of SEQ ID NOs: 1356-1626. In some embodiments, the CDR-L3 comprises a sequence selected from any one of SEQ ID NOs: 1898-2168. In one embodiment, the antigen-binding domain comprises a heavy chain variable region described herein and/or a light chain variable region described herein. In some embodiments, the heavy chain variable region comprises a sequence selected from any one of SEQ ID NOs: 1-271. In some embodiments, the light chain variable region comprises a sequence selected from any one of SEQ ID NOs: 272-542.

[3075] In some embodiments, the antigen-binding domain is a scFv comprising a heavy chain variable region and a light chain variable region of an amino acid sequence, e.g., a heavy chain variable region and light chain variable region described herein. In some embodiments, the antigen-binding domain (e.g., an scFv) comprises a heavy chain variable region comprising an amino acid sequence having at least one, two or three modifications (e.g., substitutions) but not more than 30, 20 or 10 modifications (e.g., substitutions) of an amino acid sequence of a heavy chain variable region provided herein, or a sequence with 85-99% (e.g., 90-99%, or 95-99%) identity to an amino acid sequence provided herein; and/or a light chain variable region comprising an amino acid sequence having at least one, two or three modifications (e.g., substitutions) but not more than 30, 20 or 10 modifications (e.g., substitutions) of an amino acid sequence of a light chain variable region provided herein, or a sequence with 85-99% (e.g., 90-99%, or 95-99%) identity to an amino acid sequence provided herein; and/or

[3076] The term “stimulatory molecule” or “stimulatory domain” refers to a molecule or portion thereof expressed by a T-cell that provides the primary cytoplasmic signaling sequence(s) that regulate primary activation of the TCR complex in a stimulatory way for at least some aspect of the T-cell signaling pathway. In one aspect, the primary signal is initiated by, for instance, binding of a TCR/CD3 complex with an MHC molecule loaded with peptide, and which leads to mediation of a T-cell response, including, but not limited to, proliferation, activation, differentiation, and the like. A primary cytoplasmic signaling sequence (also referred to as a “primary signaling domain”) that acts in a stimulatory manner may contain a signaling motif which is known as immunoreceptor tyrosine-based activation motif (ITAM). Examples of an ITAM containing primary cytoplasmic signaling sequence that is of particular use in the invention includes, but is not limited to, those derived from TCR zeta, FcR gamma, FcR beta, CD3 gamma, CD3 delta, CD3 epsilon, CDS, CD22, CD79a, CD79b, CD278 (also known as “ICOS”) and CD66d.

[3077] The term “antigen presenting cell” or “APC” refers to an immune system cell such as an accessory cell (e.g., a B-cell, a dendritic cell, and the like) that displays a foreign antigen complexed with major histocompatibility complexes (MHC's) on its surface. T-cells may recognize these complexes using their T-cell receptors (TCRs). APCs process antigens and present them to T-cells.

[3078] An “intracellular signaling domain,” as the term is used herein, refers to an intracellular portion of a molecule. The intracellular signaling domain generates a signal that promotes an immune effector function of the TFP containing cell, e.g., a TFP-expressing T-cell. Examples of immune effector function, e.g., in a TFP-expressing T-cell, include cytolytic activity and T helper cell activity, including the secretion of cytokines. In an embodiment, the intracellular signaling domain can comprise a primary intracellular signaling domain. Exemplary primary intracellular signaling domains include those derived from the molecules responsible for primary stimulation, or antigen dependent simulation. In an embodiment, the intracellular signaling domain can comprise a costimulatory intracellular domain. Exemplary costimulatory intracellular signaling domains include those derived from molecules responsible for costimulatory signals, or antigen independent stimulation.

[3079] A primary intracellular signaling domain can comprise an ITAM (“immunoreceptor tyrosine-based activation motif”). Examples of ITAM containing primary cytoplasmic signaling sequences include, but are not limited to, those derived from CD3 zeta, FcR gamma, FcR beta, CD3 gamma, CD3 delta, CD3 epsilon, CDS, CD22, CD79a, CD79b, and CD66d DAP10 and DAP12.

[3080] The term “costimulatory molecule” refers to the cognate binding partner on a T-cell that specifically binds with a costimulatory ligand, thereby mediating a costimulatory response by the T-cell, such as, but not limited to, proliferation. Costimulatory molecules are cell surface molecules other than antigen receptors or their ligands that are required for an efficient immune response. Costimulatory molecules include, but are not limited to an MHC class 1 molecule, BTLA and a Toll ligand receptor, as well as OX40, CD2, CD27, CD28, CDS, ICAM-1, LFA-1 (CD11a/CD18) and 4-1BB (CD137). A costimulatory intracellular signaling domain can be the intracellular portion of a costimulatory molecule. A costimulatory molecule can be represented in the following protein families: TNF receptor proteins, Immunoglobulin-like proteins, cytokine receptors, integrins, signaling lymphocytic activation molecules (SLAM proteins), and activating NK cell receptors. Examples of such molecules include CD27, CD28, 4-1BB (CD137), OX40, GITR, CD30, CD40, ICOS, BAFFR, HVEM, lymphocyte function-associated antigen-1 (LFA-1), CD2, CD7, LIGHT, NKG2C, SLAMF7, NKp80, CD160, B7-H3, and a ligand that specifically binds with CD83, and the like. The intracellular signaling domain can comprise the entire intracellular portion, or the entire native intracellular signaling domain, of the molecule from which it is derived, or a functional fragment thereof. The term “4-1BB” refers to a member of the TNFR superfamily with an amino acid sequence provided as GenBank Acc. No. AAA62478.2, or the equivalent residues from a non-human species, e.g., mouse, rodent, monkey, ape and the like; and a “4-1BB costimulatory domain” is defined as amino acid residues 214-255 of GenBank Acc. No. AAA62478.2, or the equivalent residues from a non-human species, e.g., mouse, rodent, monkey, ape and the like.

### Extracellular Domain

[3081] The extracellular domain may be derived either from a natural or from a recombinant source. Where the source is natural, the domain may be derived from any protein, but in particular a membrane-bound or transmembrane protein. In one aspect the extracellular domain is capable of associating with the transmembrane domain. An extracellular domain of particular use in this invention may include at least the extracellular region(s) of e.g., the alpha, beta or zeta chain of the T-cell receptor, or CD3 epsilon, CD3 gamma, or CD3 delta, or in alternative embodiments, CD28, CD45, CD4, CDS, CD8, CD9, CD16, CD22, CD33, CD37, CD64, CD80, CD86, CD134, CD137, CD154.

### Transmembrane Domain

[3082] In general, a TFP sequence contains an extracellular domain and a transmembrane domain encoded by a single genomic sequence. In alternative embodiments, a TFP can be designed to comprise a transmembrane domain that is heterologous to the extracellular domain of the TFP. A transmembrane domain can include one or more additional amino acids adjacent to the transmembrane region, e.g., one or more amino acid associated with the extracellular region of the protein from which the transmembrane was derived (e.g., 1, 2, 3, 4, 5, 6, 7, 8, 9, 10 or up to 15 amino acids of the extracellular region) and/or one or more additional amino acids associated with the intracellular region of the protein from which the transmembrane protein is derived (e.g., 1, 2, 3, 4, 5, 6, 7, 8, 9, 10 or up to 15 amino acids of the intracellular region). In one aspect, the transmembrane domain is one that is associated with one of the other domains of the TFP is used. In some instances, the transmembrane domain can be selected or modified by amino acid substitution to avoid binding of such domains to the transmembrane domains of the same or different surface membrane proteins, e.g., to minimize interactions with other members of the receptor complex. In one aspect, the transmembrane domain is capable of homodimerization with another TFP on the TFP-T-cell surface. In a different aspect the amino acid sequence of the transmembrane domain may be modified or substituted so as to minimize interactions with the binding domains of the native binding partner present in the same TFP.

[3083] The transmembrane domain may be derived either from a natural or from a recombinant source. Where the source is natural, the domain may be derived from any membrane-bound or transmembrane protein. In one aspect the transmembrane domain is capable of signaling to the intracellular domain(s) whenever the TFP has bound to a target. A transmembrane domain of particular use in this invention may include at least the transmembrane region(s) of e.g., the alpha, beta or zeta chain of the T-cell receptor, CD28, CD3 epsilon, CD45, CD4, CD5, CD8, CD9, CD16, CD22, CD33, CD37, CD64, CD80, CD86, CD134, CD137, CD154. In some instances, the transmembrane domain can be attached to the extracellular region of the TFP, e.g., the antigen-binding domain of the TFP, via a hinge, e.g., a hinge from a human protein. For example, in one embodiment, the hinge can be a human immunoglobulin (Ig) hinge, e.g., an IgG4 hinge, or a CD8a hinge.

### Linkers

[3084] Optionally, a linker may form the linkage between the transmembrane domain and the cytoplasmic region of the TFP. For examples of linker orientation and size see, e.g., Hollinger et al. 1993 Proc Natl Acad. Sci. U.S.A. 90:6444-6448, U.S. Patent Application Publication Nos. 2005/0100543, 2005/0175606, 2007/0014794, and PCT publication Nos. WO2006/020258 and WO2007/024715, is incorporated herein by reference. For example, a short oligo- or polypeptide linker, between 2 and 10 amino acids in length may form the linkage between the transmembrane domain and the cytoplasmic region of the TFP. In some instances, a linker can be about 10, 11, 12, 13, 14, 15 or greater than 15 residues between VL and VH regions. The linker sequence may comprise any naturally occurring amino acid. Variation in the linker length may retain or enhance activity, giving rise to superior efficacy in activity studies. In one aspect, a linker comprises amino acids glycine and serine with an optimized length and/or amino acid composition. The linker length can greatly affect how the variable regions of a polypeptide fold and interact. In fact, if a short polypeptide linker is employed (e.g., between 5-10 amino acids) intra-chain folding is prevented. Inter-chain folding is also required to bring the two variable regions together to form a functional epitope binding site. In some embodiments, the linker sequence comprises sets of glycine and serine repeats such as (Gly4Ser)n, where n is a positive integer equal to or greater than 1. In some instances, the linker sequence comprises a long linker (LL) sequence. In some instances, the long linker sequence comprises (G4S)n, wherein n=2 to 4. In some instances, the linker sequence comprises a short linker (SL) sequence. In some instances, the short linker sequence comprises (G4S)n, wherein n=1 to 3. A glycine-serine doublet provides a particularly suitable linker. For example, in one aspect, the linker comprises the amino acid sequence of GGGGSGGGGS. In some embodiments, the linker is encoded by a nucleotide sequence of GGTGGCGGAGGTTCTGGAGGTGGAGGTTCC. In one embodiment, the linker can be (Gly4Ser)4 or (Gly4Ser)3.

### Purification

[3085] The term “isolated” means altered or removed from the natural state. For example, a nucleic acid or a polypeptide naturally present in a living animal is not “isolated,” but the same nucleic acid or polypeptide partially or completely separated from the coexisting materials of its natural state is “isolated.” An isolated nucleic acid or polypeptide can exist in substantially purified form, or can exist in a non-native environment such as, for example, a host cell. An isolated polypeptide is one that has been separated and/or recovered from a component of its natural environment. Contaminant components of its natural environment are materials that would interfere with diagnostic or therapeutic uses of the polypeptide, and may include enzymes, hormones, and other proteinaceous or non-proteinaceous components. In preferred embodiments, the polypeptide is purified: (1) to greater than 95% by weight of polypeptide as determined by the Lowry method, and most preferably more than 99% by weight; (2) to a degree sufficient to obtain at least 15 residues of N-terminal or internal amino acid sequence by use of a spinning cup sequenator; or (3) to homogeneity as shown by SDS-PAGE under reducing or non-reducing conditions and using Coomassie blue or, preferably, silver staining. Isolated antibody includes the polypeptide in situ within recombinant cells since at least one component of the polypeptide's natural environment will not be present. Ordinarily, however, isolated polypeptide will be prepared by at least one purification step.

[3086] In one aspect, disclosed herein is a purified antibody or antigen-binding fragment as provided herein. Once expressed, the whole antibodies, their dimers, individual light and heavy chains, or other immunoglobulin forms of the present invention can be recovered and purified by known techniques, e.g., immunoabsorption or immunoaffinity chromatography, chromatographic methods such as HPLC (high performance liquid chromatography), ammonium sulfate precipitation, gel electrophoresis, or any combination of these. See generally, Scopes, PROTEIN PURIF. (Springer-Verlag, NY, 1982).

[3087] Substantially pure immunoglobulins of at least about 90% to 95% homogeneity are advantageous, as are those with 98% to 99% or more homogeneity, particularly for pharmaceutical uses. When using recombinant techniques, the antibody can be produced intracellularly, in the periplasmic space, or directly secreted into the medium, including from microbial cultures. If the antibody is produced intracellularly, as a first step, the particulate debris, either host cells or lysed fragments, is removed, for example, by centrifugation or ultrafiltration. Better et al. Science 240: 1041-1043 (1988); ICSU Short Reports 10: 105 (1990); and Proc. Natl. Acad. Sci. USA 90: 457-461 (1993) describe a procedure for isolating antibodies which are secreted to the periplasmic space of E. coli. (See also, [Carter et al., Bio/Technology 10: 163-167 (1992)].

[3088] The antibody composition prepared from microbial or mammalian cells can be purified using, for example, hydroxylapatite chromatography cation or avian exchange chromatography, and affinity chromatography, with affinity chromatography being the preferred purification technique. The suitability of protein A as an affinity ligand depends on the species and isotype of any immunoglobulin Fe domain that is present in the antibody. Protein A can be used to purify antibodies that are based on human γ1, γ2, or γ4 heavy chains (Lindmark et al., J. Immunol. Meth. 62: 1-13 (1983)). Protein G is recommended for all mouse isotypes and for human γ3 (Guss et al., EMBO J. 5: 15671575 (1986)). The matrix to which the affinity ligand is attached is most often agarose, but other matrices are available. Mechanically stable matrices such as controlled pore glass or poly(styrenedivinyl)benzene allow for faster flow rates and shorter processing times than can be achieved with agarose. Where the antibody comprises a CH 3 domain, the Bakerbond ABX™ resin (J. T. Baker, Phillipsburg, N.J.) is useful for purification. Other techniques for protein purification such as fractionation on an ion-exchange column, ethanol precipitation, Reverse Phase HPLC, chromatography on silica, chromatography on heparin SEPHAROSE™ chromatography on an anion or cation exchange resin (such as a polyaspartic acid column), chromatofocusing, SDS-PAGE, and ammonium sulfate precipitation are also available depending on the antibody to be recovered. Once purified, partially or to homogeneity as desired, a humanized or composite human antibody can then be used therapeutically or in developing and performing assay procedures, immunofluorescent staining, and the like. See generally, Vols. I & II Immunol. Meth. (Lefkovits & Pernis, eds., Acad. Press, N Y, 1979 and 1981).

[3089] Functional activities of an antibody or antigen-binding fragment disclosed herein include, but are not limited to, biological activity and ability to bind to a cancer cell antigen. Additionally, a polypeptide having functional activity means the polypeptide exhibits activity similar, but not necessarily identical to, an activity of an antibody described herein, including mature forms, as measured in a particular assay, such as, for example, a biological assay, with or without dose dependency. In the case where dose dependency does exist, it need not be identical to that of the antibodies of the disclosure, but rather substantially similar to the dose-dependence in a given activity as compared to the antibodies set forth herein (i.e., the candidate polypeptide will exhibit greater activity, or not more than about 25-fold less, about 10-fold less, or about 3-fold less activity relative to the antibodies described herein).

### Methods of Engineering Antibodies

[3090] As discussed above, antibodies having VH and VL sequences disclosed herein can be used to create new antibodies, respectively, by modifying the VH and/or VL sequences, or the constant regions attached thereto. Thus, in another aspect according to at least some embodiments of the present disclosure, the structural features of an antibody disclosed herein according to at least some embodiments of the disclosure, are used to create structurally related antibodies that retain at least one functional property of the parent antibodies according to at least some embodiments of the disclosure herein, such as binding to human cancer cell antigen, respectively. For example, one or more CDR regions of one antibody disclosed herein or mutations thereof, can be combined recombinantly with known framework regions and/or other CDRs to create additional, recombinantly-engineered, antibodies according to at least some embodiments of the disclosure, as discussed above. Other types of modifications include those described in the previous section. The starting material for the engineering method is one or more of the VH and/or VL sequences provided herein, or one or more CDR regions thereof, or one or more of the CDR3 region sequences provided herein. To create the engineered antibody, it is not necessary to actually prepare (i.e., express as a protein) an antibody having one or more of the VH and/or VL sequences provided herein, or one or more CDR regions thereof. Rather, the information contained in the sequences is used as the starting material to create a “second generation” sequences derived from the original sequences and then the “second generation” sequences is prepared and expressed as a protein.

[3091] Standard molecular biology techniques can be used to prepare and express altered antibody sequence. Preferably, the antibody encoded by the altered antibody sequences is one that retains one, some or all of the functional properties of the antibodies disclosed herein, respectively, produced by methods and with sequences provided herein, which functional properties include, for example, binding to a cancer cell antigen with a specific K_{D} level or less and/or modulating immune stimulation and/or selectively binding to desired target cells such as for example, that express cancer associated antigen.

[3092] The functional properties of the altered antibodies can be assessed using standard assays available in the art and/or described herein. In some embodiments, mutations can be introduced randomly or selectively along all or part of an antibody coding sequence disclosed herein and the resulting modified antibodies can be screened for binding activity and/or other desired functional properties. Mutational methods have been described in the art. For example, PCT Publication WO 02/092780 by Short describes methods for creating and screening antibody mutations using saturation mutagenesis, synthetic ligation assembly, or a combination thereof. Alternatively, PCT Publication WO 03/074679 by Lazar et al. describes methods of using computational screening methods to optimize physiochemical properties of antibodies.

### Nucleic Acid Molecules Encoding Antibodies

[3093] Using the information provided herein, for example, the nucleic acid and amino acid sequences disclosed herein; a nucleic acid molecule encoding the antibodies or antigen-binding fragment thereof can be obtained. Such a nucleic acid molecule can be obtained, for example, using conventional methods disclosed in the art. Nucleic acid molecules of the present disclosure may be in the form of RNA, such as mRNA, hnRNA, tRNA or any other form, or in the form of DNA, including but not limited to, cDNA and genomic DNA obtained by cloning or produced synthetically, or any combinations thereof. The DNA may be triplex, duplex or single-stranded, or any combination thereof. Any portion of at least one strand of the DNA or RNA may be the coding strand, also known as the sense strand, or it can be the antisense strand, also known as the antisense strand.

[3094] “Polynucleotide,” or “nucleic acid,” or “nucleic acid molecule” as used interchangeably herein, refer to polymers of nucleotides of any length, and include DNA and RNA. The nucleotides can be deoxyribonucleotides, ribonucleotides, modified nucleotides or bases, and/or their analogs, or any substrate that can be incorporated into a polymer by DNA or RNA polymerase. A polynucleotide may comprise modified nucleotides, such as methylated nucleotides and their analogs. If present, modification to the nucleotide structure may be imparted before or after assembly of the polymer. The sequence of nucleotides may be interrupted by non-nucleotide components. A polynucleotide may be further modified after polymerization, such as by conjugation with a labeling component. Other types of modifications include, for example, “caps”, substitution of one or more of the naturally occurring nucleotides with an analog, internucleotide modifications such as, for example, those with uncharged linkages (e.g., methyl phosphonates, phosphotriesters, phosphoamidates, carbamates, etc.) and with charged linkages (e.g., phosphorothioates, phosphorodithioates, etc.), those containing pendant moieties, such as, for example, proteins (e.g., nucleases, toxins, antibodies, signal peptides, ply-L-lysine, etc.), those with intercalators (e.g., acridine, psoralen, etc.), those containing chelators (e.g., metals, radioactive metals, boron, oxidative metals, etc.), those containing alkylators, those with modified linkages (e.g., alpha anomeric nucleic acids, etc.), as well as unmodified forms of the polynucleotide(s). Further, any of the hydroxyl groups ordinarily present in the sugars may be replaced, for example, by phosphonate groups, phosphate groups, protected by standard protecting groups, or activated to prepare additional linkages to additional nucleotides, or may be conjugated to solid supports. The 5′ and 3′ terminal OH can be phosphorylated or substituted with amines or organic capping group moieties of from 1 to 20 carbon atoms. Other hydroxyls may also be derivatized to standard protecting groups. Polynucleotides can also contain analogous forms of ribose or deoxyribose sugars that are generally known in the art, including, for example, 2′-O-methyl-, 2′-O-allyl, 2′-fluoro- or 2′-azido-ribose, carbocyclic sugar analogs, α-anomeric sugars, epimeric sugars such as arabinose, xyloses or lyxoses, pyranose sugars, furanose sugars, sedoheptuloses, acyclic analogs and abasic nucleoside analogs such as methyl riboside. One or more phosphodiester linkages may be replaced by alternative linking groups. These alternative linking groups include, but are not limited to, embodiments wherein phosphate is replaced by P(O)S (“thioate”), P(S)S (“dithioate”), “(O)NR2 (“amidate”), P(O)R, P(O)OR′, CO or CH2 (“formacetal”), in which each R or R′ is independently H or substituted or unsubstituted alkyl (1-20 C) optionally containing an ether (—O—) linkage, aryl, alkenyl, cycloalkyl, cycloalkenyl or araldyl. Not all linkages in a polynucleotide need be identical. The preceding description applies to all polynucleotides referred to herein, including RNA and DNA.

[3095] In the context of the present invention, the following abbreviations for the commonly occurring nucleic acid bases are used. “A” refers to adenosine, “C” refers to cytosine, “G” refers to guanosine, “T” refers to thymidine, and “U” refers to uridine. In some embodiments, the nucleic acid molecule comprises an isolated nucleic acid. In some embodiments, a nucleic acid molecule comprises one more nucleic acid sequences operably linked to one another. The term “operably linked” or “transcriptional control” refers to functional linkage between a regulatory sequence and a heterologous nucleic acid sequence resulting in expression of the latter. For example, a first nucleic acid sequence is operably linked with a second nucleic acid sequence when the first nucleic acid sequence is placed in a functional relationship with the second nucleic acid sequence. For instance, a promoter is operably linked to a coding sequence if the promoter affects the transcription or expression of the coding sequence. Operably linked DNA sequences can be contiguous with each other and, e.g., where necessary to join two protein coding regions, are in the same reading frame.

[3096] “Isolated nucleic acid”, as used herein, is a nucleic acid that is substantially separated from other genome DNA sequences as well as proteins or complexes such as ribosomes and polymerases, which naturally accompany a native sequence. The term embraces a nucleic acid sequence that has been removed from its naturally occurring environment, and includes recombinant or cloned DNA isolates and chemically synthesized analogues or analogues biologically synthesized by heterologous systems. A substantially pure nucleic acid includes isolated forms of the nucleic acid. Of course, this refers to the nucleic acid as originally isolated and does not exclude genes or sequences later added to the isolated nucleic acid by the hand of man.

[3097] Another aspect of the present disclosure pertains to nucleic acid molecules comprising nucleic acid sequences that encode the antibody polypeptide, described herein or antigen-binding fragment thereof. In some embodiments, the nucleic acid sequence encoding a heavy chain polypeptide is selected from any one of SEQ ID NOs: 2169-2439. In some embodiments, the isolated nucleic acid molecule comprises a nucleic acid sequence encoding a light chain polypeptide of an antibody. In some embodiments, the nucleic acid sequence encoding a light chain polypeptide is selected from any one of SEQ ID NOs: 2440-2710. In some embodiments, the isolated nucleic acid molecule comprises a nucleic acid sequence encoding a CDR1, CDR2, or CDR3 polypeptide of a variable heavy chain. In some embodiments, the isolated nucleic acid molecule comprises a nucleic acid sequence encoding a CDR1, CDR2, or CDR3 polypeptide of a variable light chain. In some embodiments, the nucleic acid sequence encoding the CDR1 polypeptide of a variable heavy chain (CDR-H1) is selected from any one of SEQ ID NOS: 2711-2981. In some embodiments, the nucleic acid sequence encoding the CDR2 polypeptide of a variable heavy chain (CDR-H2) is selected from any one of SEQ ID NOS: 3253-3523. In some embodiments, the nucleic acid sequence encoding the CDR3 polypeptide of a variable heavy chain (CDR-H3) is selected from any one of SEQ ID NOS: 3795-4065.

[3098] In some embodiments, the nucleic acid molecule comprises a sequence encoding a CDR1, CDR2, or CDR3 polypeptide of a variable light chain. In some embodiments, the nucleic acid sequence encoding the CDR1 region of a variable light chain polypeptide is selected from any one of SEQ ID NOS: 2982-3252. In some embodiments, the nucleic acid sequence encoding the CDR2 region of a variable light chain polypeptide is selected from any one of SEQ ID NOS: 3524-3794. In some embodiments, the nucleic acid sequence encoding the CDR3 region of a variable light chain polypeptide is selected from any one of SEQ ID NOS: 4056-4336. The nucleic acids can be present in whole cells, in a cell lysate, or in a partially purified or substantially pure form. A nucleic acid is “isolated” or “rendered substantially pure” when purified away from other cellular components or other contaminants, e.g., other cellular nucleic acids or proteins, by standard techniques, including alkaline/SDS treatment, CsCl banding, column chromatography, agarose gel electrophoresis and others well known in the art. See, F. Ausubel, et al., ed. (1987) Current Protocols in Molecular Biology, Greene Publishing and Wiley Interscience, New York. A nucleic acid according to at least some embodiments of the disclosure can be, for example, DNA or RNA and may or may not contain intronic sequences. In a preferred embodiment, the nucleic acid is a cDNA molecule.

[3099] Nucleic acids according to at least some embodiments of the present disclosure can be obtained using standard molecular biology techniques. For antibodies expressed by hybridomas (e.g., hybridomas prepared from transgenic mice carrying human immunoglobulin genes as described further below), cDNAs encoding the light and heavy chains of the antibody made by the hybridoma can be obtained by standard PCR amplification or cDNA cloning techniques. For antibodies obtained from an immunoglobulin gene library (e.g., using phage display techniques), nucleic acid encoding the antibody can be recovered from the library.

[3100] Once DNA fragments encoding VH and VL segments are obtained, these DNA fragments can be further manipulated by standard recombinant DNA techniques, for example to convert the variable region genes to full-length antibody chain genes, to Fab fragment genes or to a scFv gene. In these manipulations, a VL- or VH-encoding DNA fragment is operatively linked to another DNA fragment encoding another protein, such as an antibody constant region or a flexible linker. The term “operatively linked”, as used in this context, is intended to mean that the two DNA fragments are joined such that the amino acid sequences encoded by the two DNA fragments remain in-frame. The isolated DNA encoding the VH region can be converted to a full-length heavy chain gene by operatively linking the VH-encoding DNA to another DNA molecule encoding heavy chain constant regions (CH1, CH2 and CH3). The sequences of human heavy chain constant region genes are known in the art (see e.g., Kabat, E. A., et al. (1991) Sequences of Proteins of Immunological Interest, Fifth Edition, U.S. Department of Health and Human Services, NIH Publication No. 91-3242) and DNA fragments encompassing these regions can be obtained by standard PCR amplification. The heavy chain constant region can be an IgG1, IgG2, IgG3, IgG4, IgA, IgE, IgM or IgD constant region, but most preferably is an IgG1 or IgG4 constant region. For a Fab fragment heavy chain gene, the VH-encoding DNA can be operatively linked to another DNA molecule encoding only the heavy chain CH1 constant region.

[3101] The isolated DNA encoding the VL region can be converted to a full-length light chain gene (as well as a Fab light chain gene) by operatively linking the VL-encoding DNA to another DNA molecule encoding the light chain constant region, CL. The sequences of human light chain constant region genes are known in the art (see e.g., Kabat, E. A., et al. (1991) Sequences of Proteins of Immunological Interest, Fifth Edition, U.S. Department of Health and Human Services, NIH Publication No. 91-3242) and DNA fragments encompassing these regions can be obtained by standard PCR amplification. The light chain constant region can be a kappa or lambda constant region, but most preferably is a kappa constant region.

[3102] To create a scFv gene, the VH- and VL-encoding DNA fragments are operatively linked to another fragment encoding a flexible linker, e.g., encoding the amino acid sequence (Gly-Gly-Gly-Gly-Ser)3, such that the VH and VL sequences can be expressed as a contiguous single-chain protein, with the VL and VH regions joined by the flexible linker (see e.g., Bird et al. (1988) Science 242:423-426; Huston et al. (1988) Proc. Natl. Acad. Sci. USA 85:5879-5883; McCafferty et al., (1990) Nature 348:552-554).

[3103] In one aspect, the present disclosure provides methods for treatment or prevention of cancer comprising administering nucleic acid molecules, wherein the nucleic acid molecules encode for a VH, VL, CDR3 region of VH or CDR 3 region of VL or antigen-binding fragment thereof, wherein the nucleic acid molecule comprises a sequence disclosed herein (e.g. Table 2) by way of gene therapy. Gene therapy refers to therapy performed by the administration to a subject of an expressed or expressible nucleic acid. In this embodiment of the invention, the nucleic acids produce their encoded protein that mediates a prophylactic or therapeutic effect. Any of the methods for gene therapy available in the art can be used according to the embodiments herein.

[3104] For general reviews of the methods of gene therapy, see Goldspiel et al., 1993, Clinical Pharmacy 12:488-505; Wu and Wu, 1991, Biotherapy 3:87-95; Tolstoshev, 1993, Ann. Rev. Pharmacol. Toxicol. 32:573-596; Mulligan, 1993, Science 260:926-932; and Morgan and Anderson, 1993, Ann. Rev. Biochem. 62:191-217; May, 1993, TIBTECH 11(5):155-215. Methods. commonly known in the art of recombinant DNA technology which can be used are described in Ausubel et al. (eds.), 1993, Current Protocols in Molecular Biology, John Wiley & Sons, NY; and Kriegler, 1990, Gene Transfer and Expression, A Laboratory Manual, Stockton Press, NY. Delivery of a therapeutic antibody to appropriate cells can be effected via gene therapy ex vivo, in situ, or in vivo by use of any suitable approach known in the art, including by use of physical DNA transfer methods (e.g., liposomes or chemical treatments) or by use of viral vectors (e.g., adenovirus, adeno-associated virus, or a retrovirus). For example, for in vivo therapy, a nucleic acid encoding the desired antibody, either alone or in conjunction with a vector, liposome, or precipitate may be injected directly into the subject, and in some embodiments, may be injected at the site where the expression of the antibody compound is desired. For ex vivo treatment, the subject's cells are removed, the nucleic acid is introduced into these cells, and the modified cells are returned to the subject either directly or, for example, encapsulated within porous membranes which are implanted into the patient. See, e.g. U.S. Pat. Nos. 4,892,538 and 5,283,187. There are a variety of techniques available for introducing nucleic acids into viable cells. The techniques vary depending upon whether the nucleic acid is transferred into cultured cells in vitro, or in vivo in the cells of the intended host. Techniques suitable for the transfer of nucleic acid into mammalian cells in vitro include the use of liposomes, electroporation, microinjection, cell fusion, DEAE-dextran, and calcium phosphate precipitation. A commonly used vector for ex vivo delivery of a nucleic acid is a retrovirus.

[3105] The term “host cell” as used herein refers to the particular subject cell transfected with a nucleic acid molecule and the progeny or potential progeny of such a cell. Progeny of such a cell may not be identical to the parent cell transfected with the nucleic acid molecule due to mutations or environmental influences that may occur in succeeding generations or integration of the nucleic acid molecule into the host cell genome.

[3106] Other in vivo nucleic acid transfer techniques include transfection with viral vectors (such as adenovirus, Herpes simplex I virus, or adeno-associated virus) and lipid-based systems. The nucleic acid and transfection agent are optionally associated with a microparticle. Exemplary transfection agents include calcium phosphate or calcium chloride co-precipitation, DEAE-dextran-mediated transfection, quaternary ammonium amphiphile DOTMA ((dioleoyloxypropyl) trimethylammonium bromide, commercialized as Lipofectin by GIBCO-BRL))(Felgner et al., (1987) Proc. Natl. Acad. Sci. USA 84, 7413-7417; Malone et al. (1989) Proc. Natl Acad. Sci. USA 86 6077-6081); lipophilic glutamate diesters with pendent trimethylammonium heads (Ito et al. (1990) Biochem. Biophys. Acta 1023, 124-132); the metabolizable parent lipids such as the cationic lipid dioctadecylamido glycylspermine (DOGS, Transfectam, Promega) and dipalmitoylphosphatidyl ethanolamylspermine (DPPES)(J. P. Behr (1986) Tetrahedron Lett. 27, 5861-5864; J. P. Behr et al. (1989) Proc. Natl. Acad. Sci. USA 86, 6982-6986); metabolizable quaternary ammonium salts (DOTB, N-(1-[2,3-dioleoyloxylpropyl)-N,N,N-trimethylammonium methylsulfate (DOTAP)(Boehringer Mannheim), polyethyleneimine (PEI), dioleoyl esters, ChoTB, ChoSC, DOSC)(Leventis et al. (1990) Biochim. Inter. 22, 235-241); 3beta[N—(N′,N¹-dimethylaminoethane)-carbamoyl]cholesterol (DC-Chol), dioleoylphosphatidyl ethanolamine (DOPE)/3beta[N—(N′,Ndimethylaminoethane)-carbamoyl] cholesterolDC-Chol in one to one mixtures (Gao et al., (1991) Biochim. Biophys. Acta 1065, 8-14), spermine, spermidine, lipopolyamines (Behr et al., Bioconjugate Chem, 1994, 5: 382-389), lipophilic polylysines (LPLL) (Zhou et al., (1991) Biochim. Biophys. Acta 939, 8-18), [[(1,1,3,3 tetramethylbutyl)cresoxy]ethoxy]ethyl]dimethylbnzylammonium hydroxide (DEBDA hydroxide) with excess phosphatidylcholine/cholesterol (Ballas et al., (1988) Biochim. Biophys. Acta 939, 8-18), cetyltrimethylammonium bromide (CTAB)/DOPE mixtures (Pinnaduwage et al., (1989) Biochim. Biophys. Acta 985, 33-37), lipophilic diester of glutamic acid (TMAG) with DOPE, CTAB, DEBDA, didodecylammonium bromide (DDAB), and stearylamine in admixture with phosphatidylethanolamine (Rose et al. (1991) Biotechnique 10, 520-525), DDAB/DOPE (TransfectACE, GIBCO BRL), and oligogalactose bearing lipids. Exemplary transfection enhancer agents that increase the efficiency of transfer include, for example, DEAE-dextran, polybrene, lysosome-disruptive peptide (Ohmori N I et al., Biochem Biophys Res Commun Jun. 27, 1997; 235(3):726-9), chondroitan-based proteoglycans, sulfated proteoglycans, polyethylenimine, polylysine (Pollard H et al. J Biol Chem, 1998 273 (13):7507-11), integrin-binding peptide CYGGRGDTP, linear dextran nonasaccharide, glycerol, cholesteryl groups tethered at the 3′-terminal internucleoside link of an oligonucleotide (Letsinger, R. L. 1989 Proc Natl Acad Sci USA 86: (17):6553-6), lysophosphatide, lysophosphatidylcholine, lysophosphatidylethanolamine, and 1-oleoyl lysophosphatidylcholine.

[3107] In some situations it may be desirable to deliver the nucleic acid with an agent that directs the nucleic acid containing vector to target cells. Such “targeting” molecules include antibodies specific for a cell-surface membrane protein on the target cell, or a ligand for a receptor on the target cell. Where liposomes are employed, proteins which bind to a cell-surface membrane protein associated with endocytosis may be used for targeting and/or to facilitate uptake. Examples of such proteins include capsid proteins and fragments thereof tropic for a particular cell type, antibodies for proteins which undergo internalization in cycling, and proteins that target intracellular localization and enhance intracellular half-life. In other embodiments, receptor-mediated endocytosis can be used. Such methods are described, for example, in Wu et al., 1987 or Wagner et al., 1990. For review of the currently known gene marking and gene therapy protocols, see Anderson 1992. See also WO 93/25673 and the references cited therein.

### Screening Methods for Identification of Target Antigens

### Binding Affinity

[3108] Antibodies may be screened for binding affinity by methods known in the art. For example, gel-shift assays, Western blots, radiolabeled competition assay, co-fractionation by chromatography, co-precipitation, cross linking, ELISA, and the like may be used, which are described in, for example, Current Protocols in Molecular Biology (1999) John Wiley & Sons, NY, which is incorporated herein by reference in its entirety.

[3109] To initially screen for antibodies which bind to the desired epitope on an antigen (e.g., a cancer associated antigen), a routine cross-blocking assay such as that described in Antibodies, A Laboratory Manual, Cold Spring Harbor Laboratory, Ed Harlow and David Lane (1988), can be performed. Routine competitive binding assays may also be used, in which the unknown antibody is characterized by its ability to inhibit binding of antigen to an antigen specific antibody of the invention. Intact antigen, fragments thereof, or linear epitopes can be used. Epitope mapping is described in Champe et al., J. Biol. Chem. 270: 1388-1394 (1995).

[3110] The antibodies or antigen-binding fragment thereof, described herein, may also be useful in preventing or treating cancer. The effectiveness of a candidate antibody or antigen-binding fragment thereof in preventing or treating cancer metastasis may be screened using a human amniotic basement membrane invasion model as described in Filderman et al., Cancer Res 52: 36616, 1992. In addition, any of the animal model systems for metastasis of various types of cancers may also be used. Such model systems include, but are not limited to, those described in Wenger et al., Clin. Exp. Metastasis 19: 169 73, 2002; Yi et al., Cancer Res. 62: 917 23, 2002; Tsutsumi et al., Cancer Lett., 169: 77-85, 2001; Tsingotjidou et al., Anticancer Res. 21: 971 8, 2001; Wakabayashi et al., Oncology 59: 75 80, 2000; Culp and Kogerman, Front Biosci. 3:D672 83, 1998; Runge et al., Invest Radiol. 32: 212 7; Shioda et al., J. Surg. Oneal. 64: 122 6, 1997; Ma et al., Invest Ophthalmol Vis Sci. 37: 2293 301, 1996; Kuruppu et al., J Gastroenterol Hepatol. 11: 26 32, 1996. In the presence of an effective antibody, cancer metastases may be prevented, or inhibited to result in fewer and/or smaller metastases.

[3111] The anti-tumor activity of a particular antibody, or combination of antibodies, or fragment thereof may be evaluated in vivo using a suitable animal model. For example, xenogenic lymphoma cancer models wherein human lymphoma cells are introduced into immune com-promised animals, such as nude or SCID mice. Efficacy may be predicted using assays which measure inhibition of tumor formation, tumor regression or metastasis, and the like.

[3112] In one variation of an in vitro assay, the present disclosure provides a method comprising the steps of (a) contacting an immobilized antigen with a candidate antibody and (b) detecting binding of the candidate antibody to the antigen. In an alternative embodiment, the candidate antibody is immobilized and binding of antigen is detected. Immobilization is accomplished using any of the methods well known in the art, including covalent bonding to a support, a bead, or a chromatographic resin, as well as non-covalent, high affinity interaction such as antibody binding, or use of streptavidin/biotin binding wherein the immobilized compound includes a biotin moiety. Detection of binding can be accomplished (i) using a radioactive label on the compound that is not immobilized, (ii) using a fluorescent label on the non-immobilized compound, (iii) using an antibody immunospecific for the non-immobilized compound, (iv) using a label on the non-immobilized compound that excites a fluorescent support to which the immobilized compound is attached, as well as other techniques well known and routinely practiced in the art.

### Modulator Activity

[3113] Antibodies that modulate (i.e., increase, decrease, or block) the activity or expression of desired target may be identified by incubating a putative modulator with a cell expressing the desired target and determining the effect of the putative modulator on the activity or expression of the target. The selectivity of an antibody that modulates the activity of a target polypeptide or polynucleotide can be evaluated by comparing its effects on the target polypeptide or polynucleotide to its effect on other related compounds. Selective modulators may include, for example, antibodies and other proteins, peptides, or organic molecules which specifically bind to target polypeptides or to a nucleic acid encoding a target polypeptide. Modulators of target activity will be therapeutically useful in treatment of diseases and physiological conditions in which normal or aberrant activity of target polypeptide is involved. The target can be a for example, but not limited to a cancer associated antigen.

[3114] The invention also comprehends high throughput screening (HTS) assays to identify antibodies that interact with or inhibit biological activity (i.e., inhibit enzymatic activity, binding activity, etc.) of an antigen. HTS assays permit screening of large numbers of compounds in an efficient manner. Cell-based HTS systems are contemplated to investigate the interaction between antibodies and their target antigen and their binding partners. FITS assays are designed to identify “hits” or “lead compounds” having the desired property, from which modifications can be designed to improve the desired property. Chemical modification of the “hit” or “lead compound” is often based on an identifiable structure/activity relationship between the “hit” and target antigen.

[3115] Another aspect of the present invention is directed to methods of identifying antibodies which modulate (i.e., decrease) activity of a target antigen comprising contacting a target antigen with an antibody, and determining whether the antibody modifies activity of the antigen. The activity in the presence of the test antibody is compared to the activity in the absence of the test antibody. Where the activity of the sample containing the test antibody is lower than the activity in the sample lacking the test antibody, the antibody will have inhibited activity.

[3116] A variety of heterologous systems is available for functional expression of recombinant polypeptides that are well known to those skilled in the art. Such systems include bacteria (Strosberg, et al., Trends in Pharmacological Sciences (1992) 13:95-98), yeast (Pausch, Trends in Biotechnology (1997) 15:487-494), several kinds of insect cells (Vanden Broeck, Int. Rev. Cytology (1996) 164:189-268), amphibian cells (Jayawickreme et al., Current Opinion in Biotechnology (1997) 8: 629-634) and several mammalian cell lines (CHO, HEK293, COS, etc.; see Gerhardt, et al., Eur. J. Pharmacology (1997) 334:1-23). These examples do not preclude the use of other possible cell expression systems, including cell lines obtained from nematodes (see, PCT application WO 98/37177).

[3117] In one embodiment of the invention, methods of screening for antibodies which modulate the activity of target antigen comprise contacting antibodies with a target antigen polypeptide and assaying for the presence of a complex between the antibody and the target antigen. In such assays, the ligand is typically labeled. After suitable incubation, free ligand is separated from that present in bound form, and the amount of free or uncomplexed label is a measure of the ability of the particular antibody to bind to the target antigen.

### High Throughput Screening

[3118] The present disclosure encompasses the use of HTS to identify and characterize target antigens. A HTS can be protein arrays (e.g., antibody arrays, antibody microarrays, protein microarray). The array can comprise one or more antibodies or antigen-binding fragment thereof, disclosed herein, immobilized on a solid support. Methods of production and use of such arrays are known well known in art (e.g., (Buessow et al., Nucleic Acids Res. 1998, Lueking et al., Mol Cell Proteomics., 2003; Angenendt et al., Mol Cell Proteomics., 2006) In some embodiments, very small amounts (e.g., 1 to 500m) of antibody or antigen-binding fragment thereof is immobilized. In some embodiments, there will be from 1 μg to 100 μg, from 1 μg to 50 μg, from 1 μg to 20 μg, from 3 μg to 100 μg, from 3 μg to 50 μg, from 3 μg to 20, from 5 μg to 100 μg, from 5 μg to 50 μg, from 5 μg to 20 μg of antibody present in a single sample. In one aspect, at least one of the samples in a plurality of samples will have from 1 μg to 100 μg, from 1 μg to 50 μg, from 1 μg to 20 μg, from 3 μg to 100 μg, from 3 μg to 50 μg, from 3 μg to 20, from 5 μg to 100 μg, from 5 μg to 50 μg, from 5 μg to 20 μg of antibody present. A solid support refers to an insoluble, functionalized material to which the antibodies can be reversibly attached, either directly or indirectly, allowing them to be separated from unwanted materials, for example, excess reagents, contaminants, and solvents. Examples of solid supports include, for example, functionalized polymeric materials, e.g., agarose, or its bead form Sepharose®, dextran, polystyrene and polypropylene, or mixtures thereof; compact discs comprising microfluidic channel structures; protein array chips; pipet tips; membranes, e.g., nitrocellulose or PVDF membranes; and microparticles, e.g., paramagnetic or non-paramagnetic beads. In some embodiments, an affinity medium will be bound to the solid support and the antibody will be indirectly attached to solid support via the affinity medium. In one aspect, the solid support comprises a protein A affinity medium or protein G affinity medium. A “protein A affinity medium” and a “protein G affinity medium” each refer to a solid phase onto which is bound a natural or synthetic protein comprising an Fc-binding domain of protein A or protein G, respectively, or a mutated variant or fragment of an Fc-binding domain of protein A or protein G, respectively, which variant or fragment retains the affinity for an Fc-portion of an antibody. Antibody arrays can be fabricated by the transfer of antibodies onto the solid surface in an organized high-density format followed by chemical immobilization. Representative techniques for fabrication of an array include photolithography, ink jet and contact printing, liquid dispensing and piezoelectrics. The patterns and dimensions of antibody arrays are to be determined by each specific application. The sizes of each antibody spot may be easily controlled by the users. Antibodies may be attached to various kinds of surfaces via diffusion, adsorption/absorption, or covalent cross-linking and affinity. Antibodies may be directly spotted onto a plain glass surface. To keep antibodies in a wet environment during the printing process, high percent glycerol (e.g., 30-40%) may be used in sample buffer and the spotting is carried out in a humidity-controlled environment.

### Antibody Arrays

[3119] The surface of a substrate may be modified to achieve better binding capacity. For example, the glass surface may be coated with a thin nitrocellulose membrane or poly-L-lysine such that antibodies can be passively adsorbed to the modified surface through non-specific interactions. Antibodies may be immobilized onto a support surface either by chemical ligation through a covalent bond or non-covalent binding. There are many known methods for covalently immobilizing antibodies onto a solid support. For example, MacBeath et al., (1999) J. Am. Chem. Soc. 121:7967-7968) use the Michael addition to link thiol-containing compounds to maleimide-derivatized glass slides to form a microarray of small molecules. See also, Lam & Renil (2002) Current Opin. Chemical Biol. 6:353-358. Depending upon, if the potential antigen is associated with a specific type of cancer, an antibody specific to a further biomarker may be included in the antibody array. Representative examples of biomarkers include, TROP/TNFRSF19, IL-1 sRI, uPAR, IL-10, VCAM-1 (CD106), IL-10 receptor-β, VE-cadherin, IL-13 receptor-α1, VEGF, IL-13 receptor-α2, VEGF R2 (KDR), IL-17, VEGF R3

[3120] The arrays can employ single-antibody (label-base) detection or 2-antibody (sandwich-based) detection. In some embodiments, an ELISA (also known as an antibody sandwich assay) may be performed following standard techniques as follows. Antibodies used as the capture antibodies for an antigen disposed on (e.g., coated onto) a solid support, which may then be washed at least once (e.g., with water and/or a buffer such as PBS-t), followed by a standard blocking buffer, and then at least one more wash. The solid support may then be brought into contact with the sample/biosample under conditions to allow antibody-antigen complexes to form (e.g., incubating from 1 hour to about 24 hours at a temperature from about 4° C. to about room temperature). As used herein, “biosample” and “sample” are used interchangeably and embrace both fluids (also referred to herein as fluid samples and biofluids) and tissue obtained from the subject. The term “biofluid” as used herein refers to a biological fluid sample such as blood samples, cerebral spinal fluid (CSF), urine and other liquids obtained from the subject, or a solubilized preparation of such fluids wherein the cell components have been lysed to release intra-cellular contents into a buffer or other liquid medium. The definition also includes samples that have been manipulated in any way after their procurement, such as by treatment with reagents, or enrichment for certain components, such as proteins or polynucleotides. The term “blood sample” embraces whole blood, plasma, and serum. Solid tissue samples include biopsy specimens and tissue cultures or cells derived therefrom, and the progeny thereof. A sample may comprise a single cell or more than a single cell. The biosample may also be a cultured population of cells derived from the subject human or animal. However, whenever the biosample comprises a population of cells, the method will first require that the constituents of the cells be solubilized by lysing the cells, and removing solid cell debris, thereby providing a solution of the biomarkers. Samples can be prepared by methods known in the art such as lysing, fractionation, purification, including affinity purification, FACS, laser capture micro-dissection or iospycnic centrifugation. The support may then be washed at least once (e.g., with a buffer such as PBS-t). To detect the complexation between the capture antibodies and the antigen that may be present in the sample, secondary or “detection” antibodies are applied to the solid support (e.g., diluted in blocking buffer) under conditions to allow complexation between the secondary antibodies and the respective biomarkers (e.g., at room temperature for at least one hour). The secondary antibodies are selected so as to bind a different epitope on the antigen than the capture antibody. The optimum concentrations of capture and detection antibodies are determined using standard techniques such as the “criss-cross” method of dilutions. The detection antibody may be conjugated, directly or indirectly, to a detectable label.

[3121] The term “detectable label” as used herein refers to labeling moieties known in the art. Said moiety may be, for example, a radiolabel (e.g., 3H, 1251, 35S, 14C, 32P, etc.), detectable enzyme (e.g., horse radish peroxidase (HRP), alkaline phosphatase etc.), a dye (e.g., a fluorescent dye), a colorimetric label such as colloidal gold or colored glass or plastic (e.g., polystyrene, polypropylene, latex, etc.), beads, or any other moiety capable of generating a detectable signal such as a colorimetric, fluorescent, chemiluminescent or electrochemiluminescent (ECL) signal. The term “dye” as used herein refers to any reporter group whose presence can be detected by its light absorbing or light emitting properties. For example, Cy5 is a reactive water-soluble fluorescent dye of the cyanine dye family. Cy5 is fluorescent in the red region (about 650 to about 670 nm). It may be synthesized with reactive groups on either one or both of the nitrogen side chains so that they can be chemically linked to either nucleic acids or protein molecules. Labeling is done for visualization and quantification purposes. Cy5 is excited maximally at about 649 nm and emits maximally at about 670 nm, in the far red part of the spectrum; quantum yield is 0.28 (FW=792). Suitable fluorophores (chromes) for the probes of the disclosure may be selected from, but not intended to be limited to, fluorescein isothiocyanate (FITC, green), cyanine dyes Cy2, Cy3, Cy3.5, Cy5, Cy5.5 Cy7, Cy7.5 (ranging from green to near-infrared), Texas Red, and the like. Derivatives of these dyes for use in the embodiments of the disclosure may be, but are not limited to, Cy dyes (Amersham Bioscience), Alexa Fluors (Molecular Probes Inc.), HILYTE™ Fluors (AnaSpec), and DYLITE™ Fluors (Pierce, Inc). In some embodiments, the detectable label is a chromogenic label such as biotin, in which case the detection antibody-biotin conjugate is detected using Streptavidin/Horseradish Peroxidase (HRP) or the equivalent. The streptavidin may be diluted in an appropriate block and incubated for 30 minutes at room temperature. Other detectable labels suitable for use in the present invention include fluorescent labels and chemiluminescent labels.

[3122] The support may then be washed and the label (e.g., HRP enzymatic conjugate on the streptavidin) is detected using the following standard protocols such as a chromogenic system (the SIGMA FAST™ OPD system), a fluorescent system or a chemiluminescent system. The amounts of antigen present in the sample may then be read on an ELISA plate reader (e.g., SpectraMax 384 or the equivalent). The concentration of each of the antigens may then be back-calculated (e.g., by using the standard curve generated from purified antigens and multiplied by the dilution factor following standard curve fitting methods), and then compared to a control (generated from tissue samples obtained from healthy subjects).

[3123] In one embodiment, a biosample, e.g., a biofluid, is contacted with a system of reagents, well-known in the art, that can attach biotin moieties to some or all of the constituent components of the sample, and especially to the protein or peptide constituents thereof, including the biomarkers. Following this biotinylation step, the biotinylated biosample may then be contacted with the antibody array that contains an array of antibodies specific to each of the antigens.

[3124] After an adequate incubation period, readily selected to allow the binding of any antigen in the sample to its corresponding antibody of the array, the fluid sample is washed from the array. The array is then contacted with a biotin-binding polypeptide such as avidin or streptavidin, that has been conjugated with a detectable label (as described above in connection with the ELISA). Detection of the label on the array (relative to a control) will indicate which of the biomarkers captured by the respective antibody is present in the sample.

[3125] Regardless of the specific assay format, the biotin-label-based array methods are relatively advantageous from several standpoints. Biotin-label can be used as signal amplification. Biotin is the most common method for labeling protein and the label process can be highly efficient. Furthermore, biotin can be detected using fluorescence-streptavidin and, therefore, visualized via laser scanner, or HRP-streptavidin using chemiluminescence. Using biotin-label-based antibody arrays, most targeted proteins can be detected at pg/ml levels. The detection sensitivity of the present methods can be further enhanced by using 3-DNA detection technology or rolling circle amplification (Schweitzer et al., (2000) Proc. Natl. Acad. Sci. U.S.A. 97:10113-10119; Horie et al., (1996) Int. J. Hematol. 63:303-309).

[3126] As it relates to the present disclosure, the sample can be obtained from a subject having disease (e.g., cancer) and a healthy subject.

### Protein Arrays

[3127] In some embodiments, protein arrays can be used where protein antigens with known identities are immobilized on a solid support as capture molecules and one seeks to determine whether the known antigens binds to a candidate antibody. The antigen can be labeled with a tag that allows detection or immunoprecipitation after capture by an immobilized antibody. Protein antigens can be obtained, for example, from a cancer patient or a cancer cell. A number of commercial protein arrays are available e.g., PROTOARRAY®, KINEX™, RAYBIO® Human RTK Phosphorylation Antibody Array. The antibody-antigen complexes can be obtained by methods known in the art (e.g., immunoprecipitation or Western blot). For reviews on Protein array and antibody array that can be of interest in this study, see Reymond Sutandy, et al. 2013; Liu, B. C.-S., et al. 2012; Haab B B, 2005.

[3128] In an exemplary immunoprecipitation method, an antibody or antigen-binding fragment thereof, described herein is added first to a sample comprising an antigen, and incubated to allow antigen-antibody complexes to form. Subsequently, the antigen-antibody complexes are or with protein A/G-coated beads to allow them to absorb the complexes. In a modified approach, the antibody or antigen-binding fragment thereof is fused to a His tag or other tags (e.g., FLAG tag, Biotin Tag) by recombinant DNA techniques, and immunoprecipitated using an antibody to the tag (pull-down assay). The beads are then thoroughly washed, and the antigen is eluted from the beads by an acidic solution or SDS. The eluted sampled can be analyzed using Mass Spectrometry or SDS page to identify and confirm the antigen. Methods to analyze antibody-antigen complexes formed on a protein microarray and identify the antigen via mass spec are known.

### ADCC and CDC Assays

[3129] In one aspect, the antibodies or antigen-binding fragment thereof, disclosed herein, are contemplated as therapeutic antibodies for treatment of cancer. Accordingly, the antibodies or antigen-binding fragment thereof, can be further screened in an antibody-dependent cell-mediated cytotoxicity (ADCC) assay and/or Complement-dependent cytotoxicity (CDC) assay. “ADCC activity” refers to the ability of an antibody to elicit an ADCC reaction. ADCC is a cell-mediated reaction in which antigen-nonspecific cytotoxic cells that express FcRs (e.g., natural killer (NK) cells, neutrophils, and macrophages) recognize antibody bound to the surface of a target cell and subsequently cause lysis of (i.e., “kill”) the target cell (e.g., cancer cell). The primary mediator cells are natural killer (NK) cells. NK cells express FcγRIII only, with FcγRIIIA being an activating receptor and FcγRIIIB an inhibiting one; monocytes express FcγRI, FcγRII and FcγRIII (Ravetch et al. (1991) Annu. Rev. Immunol., 9:457-92). ADCC activity can be assessed directly using an in vitro assay, e.g., a 51Cr release assay using peripheral blood mononuclear cells (PBMC) and/or NK effector cells as described in the Examples and Shields et al. (2001) J. Biol. Chem., 276:6591-6604, or another suitable method known in the art. ADCC activity may be expressed as a concentration of antibody at which the lysis of target cells is half-maximal. Accordingly, in some embodiments, the concentration of an antibody or antigen-binding fragment thereof of the disclosure, at which the lysis level is the same as the half-maximal lysis level by the wild-type control, is at least 2-, 3-, 5-, 10-, 20-, 50-, 100-fold lower than the concentration of the wild-type control itself

[3130] Additionally, in some embodiments, the antibody or antigen-binding fragment thereof of the present disclosure may exhibit a higher maximal target cell lysis as compared to the wild-type control. For example, the maximal target cell lysis of an antibody or Fc fusion protein of the invention may be 10%, 15%, 20%, 25% or more higher than that of the wild-type control. “Complement dependent cytotoxicity” or “CDC” refer to the ability of a molecule to lyse a target (e.g. cancer cell) in the presence of complement. The complement activation pathway is initiated by the binding of the first component of the complement system (C1q) to a molecule (e.g. an antibody) complexed with a cognate antigen. To assess complement activation, a CDC assay, e.g. as described in Gazzano-Santoro et al., J. Immunol. Methods 202:163 (1996), may be performed.

### Epitope Mapping

[3131] The term “epitope,” as used herein, refers to an antigenic determinant that interacts with a specific antigen-binding site in the variable region of an antibody molecule known as a paratope. A single antigen may have more than one epitope. Thus, different antibodies may bind to different areas on an antigen and may have different biological effects. Epitopes may be either conformational or linear. A conformational epitope is produced by spatially juxtaposed amino acids from different segments of the linear polypeptide chain. A linear epitope is one produced by adjacent amino acid residues in a polypeptide chain. In certain circumstance, an epitope may include moieties of saccharides, phosphoryl groups, or sulfonyl groups on the antigen.

[3132] Various techniques known to persons of ordinary skill in the art can be used to determine whether an antigen-binding domain of an antibody “interacts with one or more amino acids” within a polypeptide or protein. Exemplary techniques include, e.g., routine cross-blocking assay such as that described Antibodies, Harlow and Lane (Cold Spring Harbor Press, Cold Spring Harb., NY), alanine scanning mutational analysis, peptide blots analysis (Reineke, 2004, Methods Mol Biol 248:443-463), and peptide cleavage analysis. In addition, methods such as epitope excision, epitope extraction and chemical modification of antigens can be employed (Tomer, 2000, Protein Science 9:487-496). Another method that can be used to identify the amino acids within a polypeptide with which an antigen-binding domain of an antibody interacts is hydrogen/deuterium exchange detected by mass spectrometry. In general terms, the hydrogen/deuterium exchange method involves deuterium-labeling the protein of interest, followed by binding the antibody to the deuterium-labeled protein. Next, the protein/antibody complex is transferred to water to allow hydrogen-deuterium exchange to occur at all residues except for the residues protected by the antibody (which remain deuterium-labeled). After dissociation of the antibody, the target protein is subjected to protease cleavage and mass spectrometry analysis, thereby revealing the deuterium-labeled residues, which correspond to the specific amino acids with which the antibody interacts. See, e.g., Ehring (1999) Analytical Biochemistry 267(2):252-259; Engen and Smith (2001) Anal. Chem. 73:256A-265A. X-ray crystallography of the antigen/antibody complex may also be used for epitope mapping purposes.

[3133] The epitope on an antigen to which the antibody or antigen-binding fragment, disclosed herein, bind may consist of a single contiguous sequence of 3 or more (e.g., 3, 4, 5, 6, 7, 8, 9, 10, 11, 12, 13, 14, 15, 16, 17, 18, 19, 20 or more) amino acids of the antigen. Alternatively, the epitope may consist of a plurality of non-contiguous amino acids (or amino acid sequences) of antigen.

### Antigens

[3134] In some embodiments, the antibodies or antigen biding fragment thereof, disclosed herein, are directed to a cancer associated antigen. In some embodiments, the cancer associated antigen is a tumor antigen, i.e., a part of a tumor cell such as a protein or peptide expressed in a tumor cell which may be derived from the cytoplasm, the cell surface or the cell nucleus, in particular those which primarily occur intracellularly or as surface antigens of tumor cells. For example, tumor antigens include the carcinoembryonal antigen, α1-fetoprotein, isoferritin, and fetal sulphoglycoprotein, α2-H-ferroprotein and γ-fetoprotein. The term “cancer associated antigen” as used herein can be any type of cancer antigen that may be associated with a cancer as is known in the art and includes antigens found on the cell surface, including tumor cells, as well as soluble cancer antigens. Several cell surface antigens on tumors and normal cells have soluble counterparts. A cancer associated antigen can be a cell surface antigen or a soluble cancer antigen located in the tumor microenvironment or otherwise in close proximity to the tumor being treated. Such antigens include but are not limited to those found on cancer-associated fibroblasts (CAFs), tumor endothelial cells (TEC) and tumor-associated macrophages (TAM). Examples of cancer-associated fibroblasts (CAFs) target antigens include but are not limited to: carbonic anhydrase IX (CAIX); fibroblast activation protein alpha (FAPα); and matrix metalloproteinases (MMPs) including MMP-2 and MMP-9. Examples of Tumor endothelial cell (TECs) target antigens include, but are not limited to vascular endothelial growth factor (VEGF) including VEGFR-1, 2, and 3; CD-105 (endoglin), tumor endothelia markers (TEMs) including TEM1 and TEM8; MMP-2; Survivin; and prostate-specific membrane antigen (PMSA). Examples of tumor associated macrophage antigens include, but are not limited to: CD105; MMP-9; VEGFR-1, 2, 3 and TEM8. In one embodiment, the cancer associated antibody specific for a cancer associated antigen may be specific for cancer antigens located on non-tumor cells, for example, VEGFR-2, MMPs, Survivin, TEM8 and PMSA. The cancer associated antigen may be an epithelial cancer antigen, (e.g., breast, gastrointestinal, lung), a prostate specific cancer antigen (PSA) or prostate specific membrane antigen (PSMA), a bladder cancer antigen, a lung (e.g., small cell lung) cancer antigen, a colon cancer antigen, an ovarian cancer antigen, a brain cancer antigen, a gastric cancer antigen, a renal cell carcinoma antigen, a pancreatic cancer antigen, a liver cancer antigen, an esophageal cancer antigen, or a head and neck cancer antigen. A cancer antigen can also be a lymphoma antigen (e.g., non-Hodgkin's lymphoma or Hodgkin's lymphoma), a B-cell lymphoma cancer antigen, a leukemia antigen, a myeloma (i.e., multiple myeloma or plasma cell myeloma) antigen, an acute lymphoblastic leukemia antigen, a chronic myeloid leukemia antigen, or an acute myelogenous leukemia antigen.

[3135] According to the present invention, a cancer associated antigen preferably comprises any antigen which is expressed in and optionally characteristic with respect to type and/or expression level for tumors or cancers as well as for tumor or cancer cells. In one embodiment, the term “tumor antigen” or “tumor-associated antigen” or “cancer antigen” or “cancer associated antigen” relates to proteins that are under normal conditions specifically expressed in a limited number of tissues and/or organs or in specific developmental stages, for example, the cancer associated antigen may be under normal conditions specifically expressed in stomach tissue, preferably in the gastric mucosa, in reproductive organs, e.g., in testis, in trophoblastic tissue, e.g., in placenta, or in germ line cells, and are expressed or aberrantly expressed in one or more tumor or cancer tissues. In this context, “a limited number” preferably means not more than 3, more preferably not more than 2. The cancer associated antigen in the context of the present invention include, for example, differentiation antigens, preferably cell type specific differentiation antigens, i.e., proteins that are under normal conditions specifically expressed in a certain cell type at a certain differentiation stage, cancer/testis antigens, i.e., proteins that are under normal conditions specifically expressed in testis and sometimes in placenta, and germ line specific antigens. Preferably, the cancer associated antigen or the aberrant expression of the cancer associated antigen identifies cancer cells. In the context of the present invention, the cancer associated antigen that is expressed by a cancer cell in a subject, e.g., a patient suffering from a cancer disease, is preferably a self-protein in said subject. In preferred embodiments, the cancer associated antigen in the context of the present invention is expressed under normal conditions specifically in a tissue or organ that is non-essential, i.e., tissues or organs which when damaged by the immune system do not lead to death of the subject, or in organs or structures of the body which are not or only hardly accessible by the immune system. A “cancer associated antigen”, as used herein can be any antigenic substance (antigen) produced or overexpressed in tumor cells. It can, for example, trigger an immune response in the host. Alternatively, for purposes of this disclosure, cancer associated antigens can be proteins that are expressed by both healthy and tumor cells, but because they identify a certain tumor type, they can be a suitable therapeutic target. Non-limiting examples of cancer associated antigen include CD19, CD20, CD30, CD33, CD38, Her2/neu, ERBB2, CA125, MUC-1, prostate-specific membrane antigen (PSMA), CD44 surface adhesion molecule, mesothelin, carcinoembryonic antigen (CEA), epidermal growth factor receptor (EGFR), EGFRvIII, vascular endothelial growth factor receptor-2 (VEGFR2), high molecular weight-melanoma associated antigen (HMW-MAA), MAGE-A1, IL-13R-a2, GD2, or any combination thereof.

[3136] In some embodiments, the cancer associated antigen is 1p19q, ABL1, AKT1, ALK, APC, AR, ATM, BRAF, BRCA1, BRCA2, cKIT, cMET, CSF1R, CTNNB1, EGFR, EGFRvIII, ER, ERBB2 (HER2), FGFR1, FGFR2, FLT3, GNA11, GNAQ, GNAS, HER2, HRAS, IDH1, IDH2, JAK2, KDR (VEGFR2), KRAS, MGMT, MGMT-Me, MLH1, MPL, NOTCH1, NRAS, PDGFRA, Pgp, PIK3CA, PR, PTEN, RET, RRM1, SMO, SPARC, TLE3, TOP2A, TOPO1, TP53, TS, TUBB3, VHL, CDH1, ERBB4, FBXW7, HNF1A, JAK3, NPM1, PTPN11, RB1, SMAD4, SMARCB1, STK1, MLH1, MSH2, MSH6, PMS2, microsatellite instability (MSI), ROS1, ERCC1, or any combination thereof. According to the invention, the terms “cancer associated antigen” “tumor antigen”, “tumor expressed antigen”, “cancer antigen” “cancer associated antigen” and “cancer expressed antigen” are equivalents and are used interchangeably herein. In some embodiments, an antibody or antigen binding fragment thereof of the present disclosure binds an antigen provided in the Table 3 and table 4.

### Immunotherapy

[3137] In one aspect of the present disclosure, the antibodies or antigen-binding fragment thereof, disclosed herein, can initiate a potent immune response against the tumor and/or are capable of direct cytotoxicity. In this regard, the antibodies or antigen-binding fragment thereof herein may elicit tumor cell lysis by either complement-mediated or antibody-dependent cell cytotoxicity (ADCC) mechanisms, both of which require an intact Fe portion of the immunoglobulin molecule for interaction with effector cell Fe receptor sites or complement proteins. In addition, antibodies that exert a direct biological effect on tumor growth are useful in the practice of the disclosure. Potential mechanisms by which such directly cytotoxic antibodies may act include inhibition of cell growth, modulation of cellular differentiation, modulation of tumor angiogenesis factor profiles, and the induction of apoptosis. The mechanism by which a particular antibody or an antigen-binding fragment thereof, disclosed herein, exerts an anti-tumor effect may be evaluated using any number of in vitro assays designed to determine ADCC, ADMMC, complement-mediated cell lysis, and so forth, as is generally known in the art.

### Immunoconjugates

[3138] The antibodies or antigen-binding fragment thereof, disclosed herein, may be administered in their “naked” or unconjugated form, or may have therapeutic agents conjugated to them. In one embodiment, antibodies or antigen-binding fragment thereof are used as a radiosensitizer. In such embodiments, the antibodies or antigen-binding fragment are conjugated to a radiosensitizing agent. The term “radiosensitizer,” as used herein, is defined as a molecule, preferably a low molecular weight molecule, administered to animals in therapeutically effective amounts to increase the sensitivity of the cells to be radiosensitized to electromagnetic radiation and/or to promote the treatment of diseases that are treatable with electromagnetic radiation. Diseases that are treatable with electromagnetic radiation include neoplastic diseases, benign and malignant tumors, and cancerous cells.

Conjugation with Radiosensitizing Agents

[3139] The terms “electromagnetic radiation” and “radiation” as used herein include, but are not limited to, radiation having the wavelength of 10-20 to 100 meters. Preferred embodiments of the present disclosure can employ for example, the electro-magnetic radiation of: gamma-radiation c10-20 to 10-13 m), X-ray radiation (10-12 to 10-9 m), ultraviolet light (10 nm to 400 nm), visible light (400 nm to 700 nm), infrared radiation (700 nm to 1.0 mm), and microwave radiation (1 mm to 30 cm).

[3140] Radiosensitizers are known to increase the sensitivity of cancerous cells to the toxic effects of electromagnetic radiation. Many cancer treatment protocols currently employ radiosensitizers activated by the electromagnetic radiation of X-rays. Examples of X-ray activated radiosensitizers include, but are not limited to, the following: metronidazole, misonidazole, desmethylmisonidazole, pimonidazole, etanidazole, nimorazole, mitomycin C, RSU 1069, SR 4233, E09, RB 6145, nicotinamide, 5-bromode-oxyuridine (BUdR), 5-iododeoxyuridine (IUdR), bromode-oxycytidine, fluorodeoxyuridine (FUdR), hydroxyurea, cisplatin, and therapeutically effective analogs and derivatives of the same.

[3141] Photodynamic therapy (PDT) of cancers employs visible light as the radiation activator of the sensitizing agent. Examples of photodynamic radiosensitizers include the following, but are not limited to: hematoporphyrin derivatives, PHOTOFRIN®, benzoporphyrin derivatives, NPe6, tin etioporphyrin (SnET2), pheoborbide-a, bacteriochlorophyll-a, naphthalocyanines, phthalocyanines, zinc phthalocyanine, and therapeutically effective analogs and derivatives of the same.

[3142] In another embodiment, the antibody may be conjugated to a receptor (such streptavidin) for utilization in tumor pretargeting wherein the antibody-receptor conjugate is administered to the patient, followed by removal of unbound conjugate from the circulation using a clearing agent and then administration of a ligand (e.g., avidin) which is conjugated to a cytotoxic agent (e.g., a radionuclide).

Conjugation with Detectable Labels

[3143] The present disclosure further provides the above-described antibodies or antigen-binding thereof in detectably labeled form. Antibodies can be detectably labeled through the use of radioisotopes, affinity labels (such as biotin, avidin, etc.), enzymatic labels (such as horseradish peroxidase, alkaline phosphatase, etc.) fluorescent or luminescent or bioluminescent labels (such as FITC or rhodamine, etc.), paramagnetic atoms, and the like. Procedures for accomplishing such labeling are well known in the art; for example, see (Sternberger, L. A. et al., J. Histochem. Cytochem. 18:315 (1970); Bayer, E. A. et al., Meth. Enzym. 62:308 (1979); Engval, E. et al., Immunol. 109:129 (1972); Goding, J. W. J. Immunol. Meth. 13:215 (1976)).

[3144] “Label” refers to a detectable compound or composition which is conjugated directly or indirectly to the antibody. The label may itself be detectable by itself (e.g., radioisotope labels or fluorescent labels) or, in the case of an enzymatic label, may catalyze chemical alteration of a substrate compound or composition which is detectable. Alternatively, the label may not be detectable on its own but may be an element that is bound by another agent that is detectable (e.g., an epitope tag or one of a binding partner pair such as biotin-avidin, etc.). Thus, the antibody may comprise a label or tag that facilitates its isolation, and methods of the invention to identify antibodies include a step of isolating the antigen/antibody through interaction with the label or tag.

[3145] Exemplary therapeutic immunoconjugates comprise the antibody described herein conjugated to a cytotoxic agent such as a chemotherapeutic agent, toxin (e.g., an enzymatically active toxin of bacterial, fungal, plant or animal origin, or fragments thereof), or a radioactive isotope (i.e., a radioconjugate). Fusion proteins are described in further detail below.

[3146] In some embodiments, antibodies and antigen-binding fragments thereof disclosed herein can be conjugated to a therapeutic agent such as a chemotherapeutic cytotoxin, such as a cytostatic or cytocidal agent (e.g., paclitaxol, cytochalasin B or diphtheria toxin, taxol, cytochalasin B, gramicidin D, ethidium bromide, emetine, mitomycin, etoposide, tenoposide, vincristine, vinblastine, colchicin, doxorubicin, daunorubicin, dihydroxy anthracindione, mitoxantrone, mithramycin, actinomycin D, 1-dehydrotestosterone, glucocorticoids, procaine, tetracaine, lidocaine, propranolol, and puromycin and analogs or homologs thereof), antimetabolites (e.g., methotrexate, 6-mercaptopurine, 6-thioguanine, cytarabine, fludarabin, 5-fluorouracil decarbazine), alkylating agents (e.g., mechlorethamine, thioepa chlorambucil, melphalan, carmustine (BSNU) and lomustine (CCNU), cyclophosphamide, busulfan, dibromomannitol, streptozotocin, mitomycin C, and cis-dichlorodiamine platinum (II) (DDP) cisplatin), anthracyclines (e.g., daunorubicin (formerly daunomycin) and doxorubicin), antibiotics (e.g., dactinomycin (formerly actinomycin), bleomycin, mithramycin, and anthramycin (AMC), and anti-mitotic agents, a thrombotic or anti-angiogenic agent or a radioactive label. Examples of suitable cytotoxic agents and chemotherapeutic agents for forming immunoconjugates are known in the art; see, for example, WO 05/103081. In another embodiment, antibodies and antigen-binding fragments thereof disclosed herein are conjugated to a detectable substrate such as, e.g., an enzyme, fluorescent marker, chemiluminescent marker, bioluminescent material, or radioactive material. In some embodiments of the aspects described herein, the antibody and antibody fragments thereof disclosed herein are conjugated to a toxin (e.g., an enzymatically active toxin of bacterial, fungal, plant or animal origin, or fragments thereof), a small molecule, an siRNA, a nanoparticle, a targeting agent (e.g., a microbubble), or a radioactive isotope (i.e., a radioconjugate). Such conjugates are referred to herein as “immunoconjugates”. Such immunoconjugates can be used, for example, in diagnostic, theranostic, or targeting methods.

[3147] Enzymatically active toxins and fragments thereof which can be used include diphtheria A chain, nonbinding active fragments of diphtheria toxin, exotoxin A chain (from Pseudomonas aeruginosa), ricin A chain, abrin A chain, modeccin A chain, alpha-sarcin, Aleurites fordii proteins, dianthin proteins, Phytolacca americana proteins (PAPI, PAPII, and PAP-S), Momordica charantia inhibitor, curcin, crotin, Sapaonaria officinalis inhibitor, gelonin, mitogellin, restrictocin, phenomycin, enomycin and the tricothecenes. A variety of radioisotopes are available for the production of radioconjugate antibodies. Examples include, but are not limited to, 212 Bi, 131 I, 131 In, 90Y and 186Re.

[3148] Conjugates of the antibodies or antigen-binding fragments thereof described herein and a cytotoxic agent can be made using any of a variety of bifunctional protein coupling agents such as N-succinimidyl-3-(2-pyridyldithiol) propionate (SPDP), iminothiolane (IT), bifunctional derivatives of imidoesters (such as dimethyl adipimidate HCL), active esters (such as disuccinimidyl suberate), aldehydes (such as glutareldehyde), bis-azido compounds (such as bis (p-azidobenzoyl) hexanediamine), bis-diazonium derivatives (such as bis-(p-diazoniumbenzoyl)-ethylenediamine), diisocyanates (such as tolyene 2,6-diisocyanate), and bis-active fluorine compounds (such as 1,5-difluoro-2,4-dinitrobenzene). For example, a ricin immunotoxin can be prepared as described in Vitetta et al., 238 Science 1098 (1987). Carbon-14-labeled 1-isothiocyanatobenzyl-3-methyldiethylene triaminepentaacetic acid (MX-DTPA) is an exemplary chelating agent for conjugation of radionucleotide to the antibody. See WO 94/11026.

[3149] In other embodiments, the antibody or portion thereof can be conjugated to a “receptor” (e.g., streptavidin) for utilization in tumor pretargeting wherein the antibody-receptor conjugate is administered to the subject, followed by removal of unbound conjugate from the circulation using a clearing agent and then administration of a “ligand” (e.g., avidin) which is conjugated to a cytotoxic agent (e.g., a radionucleotide). In some embodiments, the antibody or antibody fragment thereof can be conjugated to biotin, and the biotin conjugated antibody or antibody fragment thereof can be further conjugated or linked to a streptavidin-bound or-coated agent, such as a streptavidin-coated microbubble, for use in, for example, molecular imaging of angiogenesis.

### Immunoconjugate Production Techniques

[3150] Techniques for conjugating such therapeutic moiety to antibodies are well known, see, e.g., Amon et al., “Monoclonal Antibodies For Immunotargeting Of Drugs In Cancer Therapy”, in Monoclonal Antibodies And Cancer Therapy, Reisfeld et al. (eds.), pp. 243-56 (Alan R. Liss, Inc. 1985); Hellstrom et al., “Antibodies For Drug Delivery”, in Controlled Drug Delivery (2nd Ed.), Robinson et al. (eds.), pp. 623-53 (Marcel Dekker, Inc. 1987); Thorpe, “Antibody Carriers Of Cytotoxic Agents In Cancer Therapy: A Review”, in Monoclonal Antibodies '84: Biological And Clinical Applications, Pinchera et al. (eds.), pp. 475-506 (1985); “Analysis, Results, And Future Prospective Of The Therapeutic Use Of Radiolabeled Antibody In Cancer Therapy”, in Monoclonal Antibodies For Cancer Detection And Therapy, Baldwin et al. (eds.), pp. 303-16 (Academic Press 1985), and Thorpe et al., “The Preparation And Cytotoxic Properties Of Antibody-Toxin Conjugates”, Immunol. Rev., 62: 119-58 (1982).

[3151] Production of immunoconjugates is described in, for example, U.S. Pat. No. 6,306,393. Immunoconjugates can be prepared by indirectly conjugating a therapeutic agent to an antibody component. General techniques are described in Shih et al., Int. J. Cancer 41:832-839 (1988); Shih et al., Int. J. Cancer 46:1101-1106 (1990); and Shih et al., U.S. Pat. No. 5,057,313. The general method involves reacting an antibody component having an oxidized carbohydrate portion with a carrier polymer that has at least one free amine function and that is loaded with a plurality of drug, toxin, chelator, boron addends, or other therapeutic agent. This reaction results in an initial Schiff base (imine) linkage, which can be stabilized by reduction to a secondary amine to form the final conjugate.

[3152] The carrier polymer is preferably an aminodextran or polypeptide of at least 50 amino acid residues, although other substantially equivalent polymer carriers can also be used. Preferably, the final immunoconjugate is soluble in an aqueous solution, such as mammalian serum, for ease of administration and effective targeting for use in therapy. Thus, solubilizing functions on the carrier polymer will enhance the serum solubility of the final immunoconjugate. In particular, an aminodextran will be preferred.

[3153] The process for preparing an immunoconjugate with an aminodextran carrier typically begins with a dextran polymer, advantageously a dextran of average molecular weight of about 10,000-100,000. The dextran is reacted with an oxidizing agent to affect a controlled oxidation of a portion of its carbohydrate rings to generate aldehyde groups. The oxidation is conveniently affected with glycolytic chemical reagents such as NaI04, according to conventional procedures.

[3154] The oxidized dextran is then reacted with a polyamine, preferably a diamine, and more preferably, a mono- or polyhydroxy diamine. Suitable amines include ethylene diamine, propylene diamine, or other like polymethylene diamines, diethylene triamine or like polyamines, 1,3-diamino-2-hydroxypropane, or other like hydroxylated diamines or polyamines, and the like. An excess of the amine relative to the aldehyde groups of the dextran is used to ensure substantially complete conversion of the aldehyde functions to Schiff base groups.

[3155] A reducing agent, such as NaBH4, NaBH3CN or the like, is used to effect reductive stabilization of the resultant Schiff base intermediate. The resultant adduct can be purified by passage through a conventional sizing column to remove cross-linked dextrans. Other conventional methods of derivatizing a dextran to introduce amine functions can also be used, e.g., reaction with cyanogen bromide, followed by reaction with a diamine. The aminodextran is then reacted with a derivative of the particular drug, toxin, chelator, immunomodulator, boron addend, or other therapeutic agent to be loaded, in an activated form, preferably, a carboxyl-activated derivative, prepared by conventional means, e.g., using dicyclohexylcarbodiimide (DCC) or a water soluble variant thereof, to form an intermediate adduct.

[3156] Alternatively, polypeptide toxins such as poke-weed antiviral protein or ricin A-chain, and the like, can be coupled to aminodextran by glutaraldehyde condensation or by reaction of activated carboxyl groups on the protein with amines on the aminodextran. Chelators for radiometals or magnetic resonance enhancers are well-known in the art. Typical are derivatives of ethylenediaminetetraacetic acid (EDTA) and diethylen-etriaminepentaacetic acid (DTPA). These chelators typically have groups on the side chain by which the chelator can be attached to a carrier. Such groups include, e.g., benzylisothiocyanate, by which the DTPA or EDTA can be coupled to the amine group of a carrier. Alternatively, carboxyl groups or amine groups on a chelator can be coupled to a carrier by activation or prior derivatization and then coupling, all by well-known means.

[3157] Boron addends, such as carboranes, can be attached to antibody components by conventional methods. For example, carboranes can be prepared with carboxyl functions on pendant side chains, as is well known in the art. Attachment of such carboranes to a carrier, e.g., aminodextran, can be achieved by activation of the carboxyl groups of the carboranes and condensation with amines on the carrier to produce an intermediate conjugate. Such intermediate conjugates are then attached to antibody components to produce therapeutically useful immunoconjugates, as described below.

[3158] A polypeptide carrier can be used instead of aminodextran, but the polypeptide carrier should have at least 50 amino acid residues in the chain, preferably 100-5000 amino acid residues. At least some of the amino acids should be lysine residues or glutamate or aspartate residues. The pendant amines of lysine residues and pendant carboxylates of glutamine and aspartate are convenient for attaching a drug, toxin, immunomodulator, chelator, boron addend or other therapeutic agent. Examples of suitable polypeptide carriers include polylysine, polyglutamic acid, polyaspartic acid, co-polymers thereof, and mixed polymers of these amino acids and others, e.g., serines, to confer desirable solubility properties on the resultant loaded carrier and immunoconjugate.

[3159] Conjugation of the intermediate conjugate with the antibody component is effected by oxidizing the carbohydrate portion of the antibody component and reacting the resulting aldehyde (and ketone) carbonyls with amine groups remaining on the carrier after loading with a drug, toxin, chelator, immunomodulator, boron addend, or other therapeutic agent. Alternatively, an intermediate conjugate can be attached to an oxidized antibody component via amine groups that have been introduced in the intermediate conjugate after loading with the therapeutic agent. Oxidation is conveniently effected either chemically, e.g., with NaIO4 or other glycolytic reagent, or enzymatically, e.g., with neuraminidase and galactose oxidase. In the case of an aminodextran carrier, not all of the amines of the aminodextran are typically used for loading a therapeutic agent. The remaining amines of aminodextran condense with the oxidized antibody component to form Schiff base adducts, which are then reductively stabilized, normally with a borohydride reducing agent.

[3160] Analogous procedures are used to produce other immunoconjugates according to the invention. Loaded polypeptide carriers preferably have free lysine residues remaining for condensation with the oxidized carbohydrate portion of an antibody component. Carboxyls on the polypeptide carrier can, if necessary, be converted to amines by, e.g., activation with DCC and reaction with an excess of a diamme.

[3161] The final immunoconjugate is purified using conventional techniques, such as sizing chromatography on Sephacryl S-300 or affinity chromatography using one or more CD84Hy epitopes. Alternatively, immunoconjugates can be prepared by directly conjugating an antibody component with a therapeutic agent. The general procedure is analogous to the indirect method of conjugation except that a therapeutic agent is directly attached to an oxidized antibody component. It will be appreciated that other therapeutic agents can be substituted for the chelators described herein. Those of skill in the art will be able to devise conjugation schemes without undue experimentation.

[3162] As a further illustration, a therapeutic agent can be attached at the hinge region of a reduced antibody component via disulfide bond formation. For example, the tetanus toxoid peptides can be constructed with a single cysteine residue that is used to attach the peptide to an antibody component. As an alternative, such peptides can be attached to the antibody component using a heterobifunctional cross-linker, such as N-succinyl 3-(2-pyridyldithio)propionate (SPDP). Yu et al., Int. J. Cancer 56:244 (1994). General techniques for such conjugation are well-known in the art. See, for example, Wong, Chemistry Of Protein Conjugation and Cross-Linking (CRC Press 1991); Upeslacis et al., “Modification of Antibodies by Chemical Methods,” in Monoclonal Antibodies: Principles and Applications, Birch et al. (eds.), pages 187-230 (Wiley-Liss, Inc. 1995); Price, “Production and Characterization of Synthetic Peptide-De-rived Antibodies,” in Monoclonal Antibodies: Production, Engineering and Clinical Application, Ritter et al. (eds.), pages 60-84 (Cambridge University Press 1995).

[3163] Conjugates of the antibody and cytotoxic agent are made using a variety of bifunctional protein coupling agents such as N-succinimidyl-3-(2-pyridyldithiol) propionate (SPDP), iminothiolane (IT), bifunctional derivatives of imidoesters (such as dimethyl adipimidate HCL), active esters (such as disuccinimidyl suberate), aldehydes (such as glutareldehyde), bis-azido compounds (such as bis (p-azido-benzoyl) hexanediamine), bis-diazonium derivatives (such as bis-(p-diazoniumbenzoyl)-ethylenediamine), diisocyanates (such as tolyene 2,6-diisocyanate), and bis-active fluorine compounds (such as 1,5-difluoro-2,4-dinitrobenzene). For example, a ricin immunotoxin can be prepared as described in Vitetta et al., Science 238: 1098 (1987). Carbon-14-labeled 1-isothiocyanatobenzyl-3-methyldiethylene triaminepentaacetic acid (MX-DTPA) is an exemplary chelating agent for conjugation of radionuclide to the antibody (see, e.g., WO 94/11026).

[3164] As described above, carbohydrate moieties in the Fe region of an antibody can be used to conjugate a therapeutic agent. However, the Fe region may be absent if an antibody fragment is used as the antibody component of the immunoconjugate. Nevertheless, it is possible to introduce a carbohydrate moiety into the light chain variable region of an antibody or antibody fragment. See, for example, Leung et al., J. Immunol. 154:5919 (1995); Hansen et al., U.S. Pat. No. 5,443,953. The engineered carbohydrate moiety is then used to attach a therapeutic agent. In addition, those of skill in the art will recognize numerous possible variations of the conjugation methods. For example, the carbohydrate moiety can be used to attach polyethyleneglycol in order to extend the half-life of an intact antibody, or antigen-binding fragment thereof, in blood, lymph, or other extracellular fluids. Moreover, it is possible to construct a “divalent immunoconjugate” by attaching therapeutic agents to a carbohydrate moiety and to a free sulfhydryl group. Such a free sulfhydryl group may be located in the hinge region of the antibody component.

### Pharmaceutical Compositions and Medicaments

[3165] The antibodies or antigen binding fragment thereof, or the compositions, described herein can be used screening for a disease, detecting a presence or a severity of a disease, providing prognosis of a disease, monitoring disease progression or relapse, as well as assessment of treatment efficacy and/or relapse of a disease, disorder or condition, as well as selecting a therapy and/or a treatment for a disease, optimization of a given therapy for a disease, monitoring the treatment of a disease, and/or predicting the suitability of a therapy for specific patients or subpopulations or determining the appropriate dosing of a therapeutic product in patients or subpopulations. In some embodiments, the disease is cancer.

[3166] For the clinical use of the methods described herein, administration of the antibodies or antigen binding fragments thereof of the present disclosure can include formulation into pharmaceutical compositions, pharmaceutical formulations, or medicaments, for administration, e.g., subcutaneous, intravenous, intradermal, intraperitoneal, oral, intramuscular, intracranial or other routs of administration. In some embodiments, the antibodies or antigen binding fragments thereof, described herein can be administered along with any pharmaceutically acceptable carrier, excipient, or diluent, which results in an effective treatment in the subject. Thus, in one aspect, the present disclosure provides pharmaceutical compositions comprising one or more antibodies or antigen binding fragment thereof, described herein, in combination with one or more pharmaceutically acceptable carrier, excipient, or diluent.

[3167] The phrase “pharmaceutically acceptable” refers to those compounds, materials, compositions, and/or dosage forms which are, within the scope of sound medical judgment, suitable for use in contact with the tissues of human beings and animals without excessive toxicity, irritation, allergic response, or other problem or complication, commensurate with a reasonable benefit/risk ratio. The phrase “pharmaceutically acceptable carrier” as used herein means a pharmaceutically acceptable material, composition or vehicle, such as a liquid or solid filler, diluent, excipient, solvent, media, encapsulating material, manufacturing aid (e.g., lubricant, talc magnesium, calcium or zinc stearate, or steric acid), or solvent encapsulating material, involved in maintaining the stability, solubility, or activity of, an antibody or antigen binding fragment thereof of the present disclosure. Examples include, but are not limited to, any of a number of standard pharmaceutical carriers such as sterile phosphate buffered saline solutions, bacteriostatic water, and the like. A variety of aqueous carriers may be used, e.g., water, buffered water, 0.4% saline, 0.3% glycine and the like, and may include other proteins for enhanced stability, such as albumin, lipoprotein, globulin, etc., subjected to mild chemical modifications or the like. Each carrier must be “acceptable” in the sense of being compatible with the other ingredients of the formulation and not injurious to the patient. The terms “excipient”, “carrier”, “pharmaceutically acceptable carrier”, or the like are used interchangeably herein. The compositions of the present disclosure may further comprise one or more pharmaceutically acceptable carriers, excipients, and other agents that are incorporated into formulations to provide improved transfer, delivery, tolerance, and the like (herein collectively referred to as “pharmaceutically acceptable carriers or diluents”). A multitude of appropriate formulations can be found in the formulary known to all pharmaceutical chemists: Remington's Pharmaceutical Sciences, Mack Publishing Company, Easton, Pa. These formulations include, for example, powders, pastes, ointments, jellies, waxes, oils, lipids, lipid (cationic or anionic) containing vesicles (such as LIPOFECTIN™), DNA conjugates, anhydrous absorption pastes, oil-in-water and water-in-oil emulsions, emulsions carbowax (polyethylene glycols of various molecular weights), semi-solid gels, and semi-solid mixtures containing carbowax. See also Powell et al. “Compendium of excipients for parenteral formulations” PDA, 1998, J Pharm Sci Technol 52:238-311.

[3168] Acceptable carriers, excipients, or stabilizers are nontoxic to recipients at the dosages and concentrations employed, and include buffers such as phosphate, citrate, and other organic acids; antioxidants including ascorbic acid and methionine; preservatives (such as octadecyldimethylbenzyl ammonium chloride; hexamethonium chloride; benzalkonium chloride, benzethonium chloride; phenol, butyl or benzyl alcohol; alkyl parabens such as methyl or propyl paraben; catechol; resorcinol; cyclohexanol; 3-pentanol; and m-cresol); low molecular weight (less than about 10 residues) polypeptides; proteins, such as serum albumin, gelatin, or immunoglobulins; hydrophilic polymers such as polyvinylpyrrolidone; amino acids such as glycine, glutamine, asparagine, histidine, arginine, or lysine; monosaccharides, disaccharides, and other carbohydrates including glucose, mannose, or dextrins; chelating agents such as EDTA; sugars such as sucrose, mannitol, trehalose or sorbitol; salt-forming counter-ions such as sodium; metal complexes (e.g., Zn-protein complexes); and/or non-ionic surfactants such as TWEEN®, PLURONICS® or polyethylene glycol (PEG).

[3169] Optionally, the formulations comprising the compositions described herein contain a pharmaceutically acceptable salt, typically, e.g., sodium chloride, and preferably at about physiological concentrations. Optionally, the formulations of the invention can contain a pharmaceutically acceptable preservative. In some embodiments the preservative concentration ranges from 0.1 to 2.0%, typically v/v. Suitable preservatives include those known in the pharmaceutical arts. Benzyl alcohol, phenol, m-cresol, methylparaben, and propylparaben are examples of preservatives. Optionally, the formulations of the invention can include a pharmaceutically acceptable surfactant at a concentration of 0.005 to 0.02%.

[3170] The compositions described herein can be specially formulated for administration of the antibody or antigen binding fragment thereof to a subject in solid, liquid or gel form, including those adapted for the following: (1) parenteral administration, for example, by subcutaneous, intramuscular, intravenous or epidural injection as, for example, a sterile solution or suspension, or sustained-release formulation; (2) topical application, for example, as a cream, ointment, or a controlled-release patch or spray applied to the skin; (3) intravaginally or intrarectally, for example, as a pessary, cream or foam; (4) ocularly; (5) transdermally; (6) transmucosally; or (7) nasally. Additionally, an antibody or antigen binding fragment thereof, or compositions of the present disclosure can be implanted into a patient or injected using a drug delivery system. See, e.g., Urquhart et al., 24 Ann. Rev. Pharmacol. Toxicol. 199 (1984); Controlled Release of Pesticides & Pharmaceuticals (Lewis, ed., Plenum Press, New York, 1981); U.S. Pat. Nos. 3,773,919, 3,270,960.

[3171] The compositions disclosed herein, comprising an antibody or antigen binding fragment, described herein, can also contain more than one active compound as necessary for the particular indication being treated, preferably those with complementary activities that do not adversely affect each other. For example, the composition can further comprise a cytotoxic agent, cytokine, growth inhibitory agent and/or an angiogenesis inhibitor such as a VEGFR antagonist. Such molecules are suitably present in combination in amounts that are effective for the purpose intended. The active ingredients of the compositions comprising an antibody or antigen binding fragment thereof described herein can also be entrapped in microcapsules prepared, for example, by coacervation techniques or by interfacial polymerization, for example, hydroxymethylcellulose or gelatin-microcapsules and poly-(methylmethacylate) microcapsules, respectively, in colloidal drug delivery systems (for example, liposomes, albumin microspheres, microparticle, microemulsions, nano-particles and nanocapsules) or in macroemulsions. Such techniques are disclosed in Remington's Pharmaceutical Sciences (16th ed., Osol, ed., 1980). The pharmaceutical composition can be also delivered in a vesicle, in particular a liposome (see Langer 1990 Science 249:1527-1533; Treat et al. (1989) in Liposomes in the Therapy of Infectious Disease and Cancer, Lopez-Berestein and Fidler (eds.), Liss, New York, pp. 353-365; Lopez-Berestein, ibid., pp. 317-327; see generally ibid.). Liposomes include emulsions, foams, micelles, insoluble monolayers, phospholipid dispersions, lamellar layers and the like, and can serve as vehicles to target the M-CSF antibodies to a particular tissue as well as to increase the half-life of the composition. A variety of methods are available for preparing liposomes, as described in, e.g., U.S. Pat. Nos. 4,837,028 and 5,019,369, which patents are incorporated herein by reference.

[3172] Liposomes containing the antibody are prepared by methods known in the art, such as described in Epstein et al., Proc. Natl. Acad. Sci. USA 82: 3688 (1985); Hwang et al., Proc. Natl Acad. Sci. USA 77: 4030 (1980); and U.S. Pat. Nos. 4,485,045 and 4,544,545. Liposomes with enhanced circulation time are disclosed in U.S. Pat. No. 5,013,556. Particularly useful liposomes can be generated by the reverse phase evaporation method with a lipid composition comprising phosphatidylcholine, cholesterol and PEG-derivatized phosphatidylethanolamine (PEG-PE). Liposomes are extruded through filters of defined pore size to yield liposomes with the desired diameter. Fab′ fragments of the antibody of the present invention can be conjugated to the liposomes as described in Martin et al., J. Biol. Chem. 257: 286-288 (1982) via a disulfide interchange reaction. A chemotherapeutic agent (such as Doxorubicin) is optionally contained within the liposome [see, e.g., Gabizon et al., J. National Cancer Inst. 81(19): 1484 (1989)].

[3173] In some embodiments, sustained-release preparations can be used. Suitable examples of sustained-release preparations include semipermeable matrices of solid hydrophobic polymers containing an antibody or antigen binding fragment of the present disclosure, in which the matrices are in the form of shaped articles, e.g., films, or microcapsule. Examples of sustained-release matrices include polyesters, hydrogels (for example, poly(2-hydroxyethyl-methacrylate), or poly(vinylalcohol)), polylactides (U.S. Pat. No. 3,773,919), copolymers of L-glutamic acid and y ethyl-L-glutamate, non-degradable ethylene-vinyl acetate, degradable lactic acid-glycolic acid copolymers such as the LUPRON DEPOT™ (injectable microspheres composed of lactic acid-glycolic acid copolymer and leuprolide acetate), and poly-D-(−)-3-hydroxybutyric acid. While polymers such as ethylene-vinyl acetate and lactic acid-glycolic acid enable release of molecules for over 100 days, certain hydrogels release proteins for shorter time periods. When encapsulated antibodies remain in the body for a long time, they can denature or aggregate as a result of exposure to moisture at 37° C., resulting in a loss of biological activity and possible changes in immunogenicity. Rational strategies can be devised for stabilization depending on the mechanism involved. For example, if the aggregation mechanism is discovered to be intermolecular S—S bond formation through thio-disulfide interchange, stabilization can be achieved by modifying sulfhydryl residues, lyophilizing from acidic solutions, controlling moisture content, using appropriate additives, and developing specific polymer matrix compositions. In certain situations, the pharmaceutical composition can be delivered in a controlled release system. In one embodiment, a pump may be used (see Langer, supra; Sefton 1987 CRC Crit. Ref. Biomed. Eng. 14:201). In another embodiment, polymeric materials can be used. In yet another embodiment, a controlled release system can be placed in proximity of the composition's target, thus requiring only a fraction of the systemic dose (see, e.g., Goodson, 1984, in Medical Applications of Controlled Release, supra, vol. 2, pp. 115-138).

[3174] A pharmaceutical composition of the present disclosure can be delivered, e.g., subcutaneously or intravenously with a standard needle and syringe. In addition, with respect to subcutaneous delivery, a pen delivery device readily has applications in delivering a pharmaceutical composition of the present invention. Such a pen delivery device can be reusable or disposable. A reusable pen delivery device generally utilizes a replaceable cartridge that contains a pharmaceutical composition. Once all of the pharmaceutical composition within the cartridge has been administered and the cartridge is empty, the empty cartridge can readily be discarded and replaced with a new cartridge that contains the pharmaceutical composition. The pen delivery device can then be reused. In a disposable pen delivery device, there is no replaceable cartridge. Rather, the disposable pen delivery device comes prefilled with the pharmaceutical composition held in a reservoir within the device. Once the reservoir is emptied of the pharmaceutical composition, the entire device is discarded. Numerous reusable pen and autoinjector delivery devices have applications in the subcutaneous delivery of a pharmaceutical composition of the present invention. Examples include, but certainly are not limited to AUTOPEN™ (Owen Mumford, Inc., Woodstock, UK), DISETRONIC™ pen (Disetronic Medical Systems, Burghdorf, Switzerland), HUMALOG MIX 75/25™ pen, HUMALOG™ pen, HUMALIN70130™ pen (Eli Lilly and Co., Indianapolis, Ind.), NOVOPEN™ I, II and III (Novo Nordisk, Copenhagen, Denmark), NOVOPEN JUNIOR™ (Novo Nordisk, Copenhagen, Denmark), BD™ pen (Becton Dickinson, Franklin Lakes, N.J.), OPTIPEN™, OPTIPEN PRO™, OPTIPEN STARLET™, and OPTICLIK™ (Sanofi-Aventis, Frankfurt, Germany), to name only a few. Examples of disposable pen delivery devices having applications in subcutaneous delivery of a pharmaceutical composition include, but certainly are not limited to the SOLOSTAR™ pen (Sanofi-Aventis), the FLEXPEN™ (Novo Nordisk), and the KWIKPEN™ (Eli Lilly).

[3175] The injectable preparations may include dosage forms for intravenous, subcutaneous, intracutaneous and intramuscular injections, drip infusions, etc. These injectable preparations may be prepared by methods publicly known. For example, the injectable preparations may be prepared, e.g., by dissolving, suspending or emulsifying the antibody or its salt described above in a sterile aqueous medium or an oily medium conventionally used for injections. As the aqueous medium for injections, there are, for example, physiological saline, an isotonic solution containing glucose and other auxiliary agents, etc., which may be used in combination with an appropriate solubilizing agent such as an alcohol (e.g., ethanol), a polyalcohol (e.g., propylene glycol, polyethylene glycol), a nonionic surfactant [e.g., polysorbate 80, HCO-50 (polyoxyethylene (50 mol) adduct of hydrogenated castor oil)], etc. As the oily medium, there are employed, e.g., sesame oil, soybean oil, etc., which may be used in combination with a solubilizing agent such as benzyl benzoate, benzyl alcohol, etc. The injection thus prepared is preferably filled in an appropriate ampoule.

[3176] Compositions of the present disclosure can be in the form of, for example, granules, powders, tablets, capsules, syrup, suppositories, injections, emulsions, elixirs, suspensions or solutions. The amount of the aforesaid antibody contained can be about 5 to about 500 mg per dosage form in a unit dose; especially in the form of injection, it is preferred that the aforesaid antibody is contained in about 5 to about 100 mg and in about 10 to about 250 mg for the other dosage forms.

[3177] For oral, buccal, and sublingual administration, powders, suspensions, granules, tablets, pills, capsules, gelcaps, and caplets are acceptable as solid dosage forms. These can be prepared, for example, by mixing one or more compounds of the instant invention, or pharmaceutically acceptable salts or tautomers thereof, with at least one additive such as a starch or other additive. Suitable additives are sucrose, lactose, cellulose sugar, mannitol, maltitol, dextran, starch, agar, alginates, chitins, chitosans, pectins, tragacanth gum, gum arabic, gelatins, collagens, casein, albumin, synthetic or semi-synthetic polymers or glycerides. Optionally, oral dosage forms can contain other ingredients to aid in administration, such as an inactive diluent, or lubricants such as magnesium stearate, or preservatives such as paraben or sorbic acid, or anti-oxidants such as ascorbic acid, tocopherol or cysteine, a disintegrating agent, binders, thickeners, buffers, sweeteners, flavoring agents or perfuming agents. Tablets and pills may be further treated with suitable coating materials known in the art.

[3178] Liquid dosage forms for oral administration may be in the form of pharmaceutically acceptable emulsions, syrups, elixirs, suspensions, and solutions, which may contain an inactive diluent, such as water. Pharmaceutical formulations and medicaments may be prepared as liquid suspensions or solutions using a sterile liquid, such as, but not limited to, an oil, water, an alcohol, and combinations of these. Pharmaceutically suitable surfactants, suspending agents, emulsifying agents, may be added for oral or par-enteral administration.

[3179] As noted above, suspensions may include oils. Such oils include, but are not limited to, peanut oil, sesame oil, cottonseed oil, corn oil and olive oil. Suspension preparation may also contain esters of fatty acids such as ethyl oleate, isopropyl myristate, fatty acid glycerides and acetylated fatty acid glycerides. Suspension formulations may include alcohols, such as, but not limited to, ethanol, iso-propyl alcohol, hexadecyl alcohol, glycerol and propylene glycol. Ethers, such as but not limited to, poly(ethyleneglycol), petroleum hydrocarbons such as mineral oil and petrolatum; and water may also be used in suspension formulations.

[3180] For nasal administration, the pharmaceutical formulations and medicaments may be a spray or aerosol containing an appropriate solvent(s) and optionally other compounds such as, but not limited to, stabilizers, antimicrobial agents, antioxidants, pH modifiers, surfactants, bio-availability modifiers and combinations of these. A propellant for an aerosol formulation may include compressed air, nitrogen, carbon dioxide, or a hydrocarbon based low boiling solvent.

[3181] Injectable dosage forms generally include aqueous suspensions or oil suspensions which may be prepared using a suitable dispersant or wetting agent and a suspending agent. Injectable forms may be in solution phase or in the form of a suspension, which is prepared with a solvent or diluent. Acceptable solvents or vehicles include sterilized water, Ringer's solution, or an isotonic aqueous saline solution. Alternatively, sterile oils may be employed as solvents or suspending agents. Preferably, the oil or fatty acid is non-volatile, including natural or synthetic oils, fatty acids, mono-, di-, or tri-glycerides.

[3182] For injection, the pharmaceutical formulation and/or medicament may be a powder suitable for reconstitution with an appropriate solution as described above. Examples of these include, but are not limited to, freeze dried, rotary dried or spray dried powders, amorphous powders, granules, precipitates, or particulates. For injection, the formulations may optionally contain stabilizers, pH modifiers, surfactants, bioavailability modifiers and combinations of these.

[3183] For rectal administration, the pharmaceutical formulations and medicaments may be in the form of a suppository, an ointment, an enema, a tablet or a cream for release of compound in the intestines, sigmoid flexure and/or rectum. Rectal suppositories are prepared by mixing one or more compounds of the instant invention, or pharmaceutically acceptable salts or tautomers of the compound, with acceptable vehicles, for example, cocoa butter or polyethylene glycol, which is present in a solid phase at normal storing temperatures, and present in a liquid phase at those temperatures suitable to release a drug inside the body, such as in the rectum. Oils may also be employed in the preparation of formulations of the soft gelatin type and suppositories. Water, saline, aqueous dextrose and related sugar solutions, and glycerols may be employed in the preparation of suspension formulations which may also contain suspending agents such as pectins, carbomers, methyl cellulose, hydroxypropyl cellulose or carboxymethyl cellulose, as well as buffers and preservatives.

[3184] The concentration of an antibody or an antigen binding fragment thereof in these compositions can vary widely, i.e., from less than about 10%, usually at least about 25% to as much as 75% or 90% by weight and will be selected primarily by fluid volumes, viscosities, etc., in accordance with the particular mode of administration selected. Actual methods for preparing orally, topically and parenterally administrable compositions will be known or apparent to those skilled in the art and are described in detail in, for example, Remington's Pharmaceutical Science, 19th ed., Mack Publishing Co., Easton, Pa. (1995), which is incorporated herein by reference.

[3185] In another embodiment of the invention, an article of manufacture containing materials useful for the treatment of the diseases, disorders or conditions described above is provided, including for treatment of cancer. The article of manufacture comprises a container and a label. Suitable containers include, for example, bottles, vials, syringes, and test tubes. The containers may be formed from a variety of materials such as glass or plastic. The container holds a composition which is effective for treating the condition and may have a sterile access port (for example the container may be an intravenous solution bag or a vial having a stopper pierceable by a hypodermic injection needle). The active agent in the composition is the antibody of the invention. The label on or associated with, the container indicates that the composition is used for treating the condition of choice. The article of manufacture may further comprise a second container comprising a pharmaceutically-acceptable buffer, such as phosphate-buffered saline, Ringer's solution and dextrose solution. It may further include other materials desirable from a commercial and user stand-point, including other buffers, diluents, filters, needles, syringes, and package inserts with instructions for use.

[3186] Pharmaceutical compositions and medicaments described herein are useful in treating a cancerous disease.

### Methods of Treatment

[3187] The disclosure provides methods for treatment or prevention of a cancer, including, but not limited to, neoplasms, tumors, metastases, or any disease or disorder characterized by uncontrolled cell growth, by the administration of an antibody or antigen-binding fragment thereof disclosed herein, to a patient in an amount effective to treat the patient.

### Treatment Terminology

[3188] As used herein, a “subject”, “patient”, “individual” and like terms are used interchangeably and refers to a vertebrate, a mammal, a primate, or a human. Mammals include, without limitation, humans, primates, rodents, wild or domesticated animals, including feral animals, farm animals, sport animals, and pets. Primates include, for example, chimpanzees, cynomologous monkeys, spider monkeys, and macaques, e.g., Rhesus. Rodents include, for example, mice, rats, woodchucks, ferrets, rabbits and hamsters. Domestic and game animals include, for example, cows, horses, pigs, deer, bison, buffalo, feline species, e.g., domestic cat, and canine species, e.g., dog, fox, wolf, avian species, e.g., chicken, emu, ostrich, and fish, e.g., trout, catfish and salmon. The terms, “individual,” “patient” and “subject” are used interchangeably herein. A subject can be male or female.

[3189] The term “in need thereof” when used in the context of a therapeutic or prophylactic treatment, means having a disease, being diagnosed with a disease, or being in need of preventing a disease, e.g., for one at risk of developing the disease. Thus, a subject in need thereof can be a subject in need of treating or preventing a disease.

[3190] As used herein, the term “administering,” refers to the placement of a compound (e.g., an antibody or antigen binding fragment thereof as disclosed herein) into a subject by a method or route that results in at least partial delivery of the agent at a desired site. Pharmaceutical compositions comprising an antibody or antigen binding fragment thereof, disclosed herein can be administered by any appropriate route which results in an effective treatment in the subject, including but not limited to intravenous, intraarterial, injection or infusion directly into a tissue parenchyma, etc. Where necessary or desired, administration can include, for example, intracerebroventricular (“icy”) administration, intranasal administration, intracranial administration, intracelial administration, intracerebellar administration, or intrathecal administration.

[3191] In some embodiments, the subject is a mammal. The mammal can be a human, non-human primate, mouse, rat, dog, cat, horse, or cow, but is not limited to these examples. Mammals other than humans can be advantageously used as subjects that represent animal models of conditions or disorders associated with uncontrolled cell growth (e.g., a cancer). Non-limiting examples include murine tumor models. In addition, the compositions and methods described herein can be used to treat domesticated animals and/or pets. A subject can be one who has been previously diagnosed with or identified as suffering from a cancer. A subject can be one who is diagnosed and currently being treated for, or seeking treatment, monitoring, adjustment or modification of an existing therapeutic treatment, or is at a risk of developing a given disorder (e.g., cancer).

[3192] The terms “disease”, “disorder”, or “condition” are used interchangeably herein, refer to any alternation in state of the body or of some of the organs, interrupting or disturbing the performance of the functions and/or causing symptoms such as discomfort, dysfunction, distress, or even death to the person afflicted or those in contact with a person. A disease or disorder can also be related to a distemper, ailing, ailment, malady, disorder, sickness, illness, complaint, or affectation.

[3193] The term “cancer” refers to a disease characterized by the rapid and uncontrolled growth of aberrant cells. Cancer cells can spread locally or through the bloodstream and lymphatic system to other parts of the body. The term “anti-tumor effect” refers to a biological effect which can be manifested by various means, including but not limited to, e.g., a decrease in tumor volume, a decrease in the number of tumor cells, a decrease in the number of metastases, an increase in life expectancy, decrease in tumor cell proliferation, decrease in tumor cell survival, or amelioration of various physiological symptoms associated with the cancerous condition. An “anti-tumor effect” can also be manifested by the ability of the peptides, polynucleotides, cells and antibodies of the invention in prevention of the occurrence of tumor in the first place.

### Exemplary Cancers

[3194] In some embodiments, the cancer can be a carcinoma, a sarcoma, a lymphoma, a leukemia, germ cell tumor, a blastoma, or a melanoma. In some embodiments, the cancer can be a cancer from the bladder, blood, bone, bone marrow, brain, breast, colon, esophagus, gastrointestine, gum, head, kidney, liver, lung, nasopharynx, neck, ovary, prostate, skin, stomach, testis, tongue, or uterus. In some embodiments, the cancer may be a neoplasm, malignant carcinoma, carcinoma, undifferentiated, giant and spindle cell carcinoma, small cell carcinoma, papillary carcinoma, squamous cell carcinoma, lymphoepithelial carcinoma, basal cell carcinoma, pilomatrix carcinoma, transitional cell carcinoma, papillary transitional cell carcinoma, adenocarcinoma; gastrinoma, cholangiocarcinoma, hepatocellular carcinoma, combined hepatocellular carcinoma and cholangiocarcinoma, trabecular adenocarcinoma, adenoid cystic carcinoma, adenocarcinoma in adenomatous polyp, adenocarcinoma, Familial adenomatous polyposis, solid carcinoma, carcinoid tumor, branchiolo-alveolar adenocarcinoma, papillary adenocarcinoma, chromophobe carcinoma, acidophil carcinoma, oxyphilic adenocarcinoma, basophil carcinoma, clear cell adenocarcinoma, granular cell carcinoma, follicular adenocarcinoma, papillary and follicular adenocarcinoma, nonencapsulating sclerosing carcinoma, adrenal cortical carcinoma, endometroid carcinoma, skin appendage carcinoma, apocrine adenocarcinoma, sebaceous adenocarcinoma, ceruminous adenocarcinoma, mucoepidermoid carcinoma, cystadenocarcinoma, papillary cystadenocarcinoma, papillary serous cystadenocarcinoma, mucinous cystadenocarcinoma, mucinous adenocarcinoma, signet ring cell carcinoma, infiltrating duct carcinoma, medullary carcinoma, lobular carcinoma, inflammatory carcinoma, Paget's disease, mammary acinar cell carcinoma, adenosquamous carcinoma, adenocarcinoma w/squamous metaplasia, thymoma, ovarian stromal tumor, thecoma, granulosa cell tumor, androblastoma, sertoli cell carcinoma, Leydig cell tumor, lipid cell tumor, paraganglioma, extra-mammary paraganglioma, pheochromocytoma, glomangiosarcoma, melanoma, Lentigo maligna, Lentigo maligna melanoma, Acral lentiginous melanoma, mucosal melanoma, nodular melanoma, polypoid melanoma, desmoplastic melanoma, skin cutaneous melanoma, amelanotic melanoma, superficial spreading melanoma, melanoma in giant pigmented nevus, epithelioid cell melanoma, blue nevus, sarcoma, fibrosarcoma, fibrous histiocytoma, myxosarcoma, liposarcoma, leiomyosarcoma, rhabdomyosarcoma, embryonal rhabdomyosarcoma, alveolar rhabdomyosarcoma, stromal sarcoma, mixed tumor, mullerian mixed tumor, nephroblastoma, hepatoblastoma, carcinosarcoma, mesenchymoma, Brenner tumor, phyllodes tumor, synovial sarcoma, mesothelioma, dysgerminoma, embryonal carcinoma, teratoma, struma ovarii, choriocarcinoma, mesonephroma, hemangiosarcoma, hemangioendothelioma, Kaposi's sarcoma, hemangiopericytoma, lymphangiosarcoma, osteosarcoma, juxtacortical osteosarcoma, chondrosarcoma, chondroblastoma, mesenchymal chondrosarcoma, giant cell tumor of bone, Ewing's sarcoma, odontogenic tumor, ameloblastic odontosarcoma, ameloblastoma, ameloblastic fibrosarcoma, pinealoma, chordoma glioma, ependymoma, astrocytoma, protoplasmic astrocytoma, fibrillary astrocytoma, astroblastoma, glioblastoma, oligodendroglioma, oligodendroblastoma, primitive neuroectodermal, cerebellar sarcoma, ganglioneuroblastoma, neuroblastoma, retinoblastoma, olfactory neurogenic tumor, meningioma, neurofibrosarcoma, neurilemmoma, granular cell tumor, malignant lymphoma, Hodgkin's disease, Hodgkin's, paragranuloma, lymphoma, small lymphocytic, malignant lymphoma, diffuse large B-cell lymphoma, follicular lymphoma, mycosis fungoides, other specified non-Hodgkin's lymphomas, histiocytosis, multiple myeloma, mast cell sarcoma, immunoproliferative small intestinal disease, leukemia, lymphoid leukemia, plasma cell leukemia, erythroleukemia, lymphosarcoma cell leukemia, myeloid leukemia, basophilic leukemia, eosinophilic leukemia, monocytic leukemia, mast cell leukemia, megakaryoblastic leukemia, myeloid sarcoma, hairy cell leukemia, or a combination thereof. In some embodiments, the cancer is lung cancer. In some embodiments, the lung cancer is non-small cell lung carcinoma, small-cell lung carcinoma, lung adenocarcinoma, lung squamous cell carcinoma, large cell carcinoma, carcinoid tumors, bronchial gland carcinomas, carcinosarcomas, pulmonary blastomas, giant and spindle cell carcinomas, and sarcomatoid carcinomas. In some embodiments, the lung cancer is stage 0, IA, IB, IIA, IIB, IIIA, IIIB, or IV. In some embodiments, the lung cancer is limited stage or extensive stage cancer. In some embodiments, the cancer is T1a, T1b, T1c, T2a, T2v, T3 size, T3 inv, T3 centr, T3 satell, T4 inv, T4 ipis, N1, or N2.

Combination Treatment with a Second Therapeutic Agent

[3195] An antibody of the present disclosure may be administered to a subject per se or in the form of a pharmaceutical composition disclosed herein for the treatment or prevention of diseases, e.g., cancer. The antibodies or antigen binding fragment thereof or the compositions described herein may be administered alone or in combination a second therapeutic agent or therapy useful for treating cancer. Examples of second therapy useful for treating cancer can include, but not limited to radiotherapy, cryotherapy, antibody therapy, chemotherapy, photodynamic therapy, surgery, hormonal therapy, immunotherapy, cytokine therapy, or a combination therapy with conventional drugs. In some embodiments, a second therapeutic agent, can be a cytotoxic drug, tumor vaccine, a peptide, a pepti-body, a small molecule, a cytotoxic agent, a cytostatic agent, immunological modifier, interferon, interleukin, immunostimulatory growth hormone, cytokine, vitamin, mineral, aromatase inhibitor, RNAi, Histone Deacetylase Inhibitor, proteasome inhibitor, a cancer chemotherapeutic agent, Tregs targeting agent, another antibody, Immunostimulatory antibody, a NSAID, a corticosteroid, a dietary supplement such as an antioxidant, cisplatin, ifosfamide, paclitaxel, taxanes, topoisomerase I inhibitors (e.g., CPT-11, topotecan, 9-AC, and GG-211), gemcitabine, vinorelbine, oxaliplatin, 5-fluorouracil (5-FU), leucovorin, vinorelbine, temodal, and taxol. In some embodiments, the second therapeutic agent is a chemotherapeutic agent selected from a group consisting of platinum based compounds, antibiotics with anti-cancer activity, Anthracyclines, Anthracenediones, alkylating agents, antimetabolites, Antimitotic agents, Taxanes, Taxoids, microtubule inhibitors, Vinca alkaloids, Folate antagonists, Topoisomerase inhibitors, Antiestrogens, Antiandrogens, Aromatase inhibitors, GnRh analogs, and inhibitors of 5α-reductase, biphosphonates.

[3196] A “cytotoxic agent” refers to an agent that has a cytotoxic and/or cytostatic effect on a cell. A “cytotoxic effect” refers to the depletion, elimination and/or the killing of a target cell(s). A “cytostatic effect” refers to the inhibition of cell proliferation.

[3197] In some embodiments, the second therapeutic agent can be a PD-1 inhibitor, histone deacetylase (HDAC) inhibitor, proteasome inhibitor, mTOR pathway inhibitor, JAK2 inhibitor, tyrosine kinase inhibitor (TKIs), PI3K inhibitor, Protein kinase inhibitor, Inhibitor of serine/threonine kinases, inhibitor of intracellular signaling, inhibitors of Ras/Raf signaling, MEK inhibitor, AKT inhibitor, inhibitor of survival signaling proteins, cyclin dependent kinase inhibitor, therapeutic monoclonal antibodies, TRAIL pathway agonist, anti-angiogenic agent, metalloproteinase inhibitor, cathepsin inhibitor, inhibitor of urokinase plasminogen activator receptor function, immunoconjugate, antibody drug conjugate, antibody fragments, bispecific antibodies, bispecific T cell engagers (BiTEs). In some embodiments, the another antibody is selected from cetuximab, panitumumab, nimotuzumab, trastuzumab, pertuzumab, rituximab, ofatumumab, veltuzumab, alemtuzumab, labetuzumab, adecatumumab, oregovomab, onartuzumab; apomab, mapatumumab, lexatumumab, conatumumab, tigatuzumab, catumaxomab, blinatumomab, ibritumomab triuxetan, tositumomab, brentuximab vedotin, gemtuzumab ozogamicin, clivatuzumab tetraxetan, pemtumomab, trastuzumab emtansine, bevacizumab, etaracizumab, volociximab, ramucirumab, aflibercept. In yet another embodiment, the second therapeutic agent can be antibodies currently used for the treatment of cancer. Examples of such antibodies include, but are not limited to, HERCEPTIN®, RETUXAN®, OvaRex, Panorex, BEC2, IMC-C225, Vitaxin, Campath I/H, Smart MI95, LymphoCide, Smart I D10, and Oncolym. In some embodiments, the another antibody is an immunostimulatory antibody is selected from antagonistic antibodies targeting one or more of CTLA4, PD-1, PDL-1, LAG-3, TIM-3, BTLA, B7-H4, B7-H3, VISTA, and/or Agonistic antibodies targeting one or more of CD40, CD137, OX40, GITR, CD27, CD28, ICOS or a combination thereof. In some embodiments, the second therapeutic agent targeting immunosuppressive cells Tregs and/or MDSCs is selected from antimitotic drugs, cyclophosphamide, gemcitabine, mitoxantrone, fludarabine, thalidomide, thalidomide derivatives, COX-2 inhibitors, depleting or killing antibodies that directly target Tregs through recognition of Treg cell surface receptors, anti-CD25 daclizumab, basiliximab, ligand-directed toxins, denileukin diftitox (ONTAK®)—a fusion protein of human IL-2 and diphtheria toxin, or LMB-2—a fusion between an scFv against CD25 and the pseudomonas exotoxin, antibodies targeting Treg cell surface receptors, TLR modulators, agents that interfere with the adenosinergic pathway, ectonucleotidase inhibitors, or inhibitors of the A2A adenosine receptor, TGF-β inhibitors, chemokine receptor inhibitors, retinoic acid, all-trans retinoic acid (ATRA), Vitamin D3, phosphodiesterase 5 inhibitors, sildenafil, ROS inhibitors and nitroaspirin. In some embodiments, the second therapeutic agent is cytokine therapy selected from one or more of the following cytokines such as IL-2, IL-7, IL-12, IL-15, IL-17, IL-18 and IL-21, IL23, IL-27, GM-CSF, IFNα (interferon alpha), IFNα-2b, IFNβ, IFNγ, and their different strategies for delivery. In some embodiments, the second therapeutic agent is a therapeutic cancer vaccine selected from a group consisting of exogenous cancer vaccines including proteins or peptides used to mount an immunogenic response to a tumor antigen, recombinant virus and bacteria vectors encoding tumor antigens, DNA-based vaccines encoding tumor antigens, proteins targeted to dendritic cell-based vaccines, whole tumor cell vaccines, gene modified tumor cells expressing GM-CSF, ICOS and/or Flt3-ligand, oncolytic virus vaccines.

[3198] In some embodiments, the second therapeutic agent include EPO, G-CSF, ganciclovir; antibiotics, leuprolide; meperidine; zidovudine (AZT); interleukins 1 through 18, including mutants and analogues; interferons or cytokines, such as interferons a, ‘ and y hormones, such as luteinizing hormone releasing hormone (LHRH) and analogues and, gonadotropin releasing hormone (GnRH); growth factors, such as transforming growth factor, fibroblast growth factor (FGF), nerve growth factor (NGF), growth hormone releasing factor (GHRF), epidermal growth factor (EGF), fibroblast growth factor homologous factor (FGFHF), hepatocyte growth factor (HGF), and insulin growth factor (IGF); tumor necrosis factor-alpha (TNF-α); invasion inhibiting factor-2 (IIF-2); bone morphogenetic proteins 1-7 (BMP 1-7); somatostatin; thymosin-a-1; y-globulin; superoxide dismutase (SOD); complement factors; anti-angiogenesis factors; antigenic materials; and pro-drugs.

[3199] Prodrug refers to a precursor or derivative form of a pharmaceutically active substance that is less cytotoxic or non-cytotoxic to tumor cells compared to the parent drug and is capable of being enzymatically activated or converted into an active or the more active parent form. See, e.g., Wilman, “Prodrugs in Cancer Chemotherapy” Biochemical Society Transactions, 14, pp. 375-382, 615th Meeting Belfast (1986) and Stella et al., “Prodrugs: A Chemical Approach to Targeted Drug Delivery,” Directed Drug Delivery, Borchardt et al., (ed.), pp. 247-267, Humana Press (1985). Prodrugs include, but are not limited to, phosphate-containing prodrugs, thiophosphate-containing prodrugs, sulfate-containing prodrugs, peptide-containing prodrugs, D-amino acid-modified prodrugs, glycosylated prodrugs, lactam-containing prodrugs, optionally substituted phenoxyacetamide-containing prodrugs or optionally substituted phenylacetamide-containing prodrugs, 5-fluorocyto-sine and other 5-fluorouridine prodrugs which can be converted into the more active cytotoxic free drug. Examples of cytotoxic drugs that can be derivatized into a prodrug form for use herein include, but are not limited to, those chemotherapeutic agents described above.

[3200] In another embodiment, the antibodies or antigen binding fragment thereof disclosed herein are administered, for the prevention or treatment of cancer prior to (e.g., 1 minute, 15 minutes, 30 minutes, 45 minutes, 1 hour, 2 hours, 4 hours, 6 hours, 8 hours, 12 hours, 24 hours, 2 days, or 1 week before), subsequent to (e.g., 1 minute, 15 minutes, 30 minutes, 45 minutes, 1 hour, 2 hours, 4 hours, 6 hours, 8 hours, 12 hours, 24 hours, 2 days, or 1 week after), or concomitantly with the second therapeutic agent. In another embodiment, the second therapeutic agent can be antibodies immunospecific for one or more cancer cell antigens. In some embodiments, the cancer is refractory to other anti-cancer treatments or a second therapeutic agent. In some embodiments, the cancer is in remission. In some embodiments, one or more antibodies disclosed herein or antigen binding fragments thereof are administered to an animal, preferably a mammal and most preferably a human. In some embodiments, the antibodies disclosed herein or antigen binding fragment thereof are administered after surgical resection of cancer. The method and compositions of the present disclosure contemplate single antibody or antigen binding fragment thereof, disclosed herein, as well as combinations, or “cocktails”, of more than one antibody or antigen binding fragment thereof, disclosed herein. In some embodiments, more than one antibody comprises at least 2, at least 3, at least 4, all 5 antibodies or antigen binding fragment thereof, disclosed herein. Such antibody cocktails may have certain advantages inasmuch as they contain antibodies which exploit different effector mechanisms or combine directly cytotoxic antibodies with antibodies that rely on immune effector functionality.

### Antibody Based Gene Therapy

[3201] In another aspect of the disclosure, nucleic acids molecules comprising sequences encoding antibodies or antigen binding fragment thereof, are administered to treat, inhibit or prevent a disease or disorder by way of gene therapy. In some embodiments, the disease is a cancer. In some embodiments, the disease is a skin cancer. In some embodiments, the disease is a skin cutaneous melanoma. In some embodiments, the disease is associated with aberrant expression and/or activity of an antigen that the antibody binds. Gene therapy refers to therapy performed by the administration to a subject of an expressed or expressible nucleic acid molecule. In this embodiment of the disclosure, the nucleic acid molecules produce their encoded protein (e.g., an antibody or antigen binding fragment disclosed herein) that mediates a therapeutic effect. Any of the methods for gene therapy available can be used according to the present invention. Exemplary methods are described below. For general reviews of the methods of gene therapy, see Goldspiel et al., Clinical Pharmacy 12:488-505 (1993); Wu and Wu, Biotherapy 3:87-95 (1991);

[3202] In a one aspect, the nucleic acid molecule comprising nucleic acid sequences encoding an antibody, said nucleic acid molecule being part of expression vectors that express the antibody or fragments or chimeric proteins or heavy or light chains thereof in a suitable host. In particular, such nucleic acid sequences have promoters operably linked to the antibody coding region, said promoter being inducible or constitutive, and, optionally, tissue-specific.

[3203] In another particular embodiment, nucleic acid molecules are used in which the antibody coding sequences and any other desired sequences are flanked by regions that promote homologous recombination at a desired site in the genome, thus providing for intrachromosomal expression of the antibody encoding nucleic acids (Koller and Smithies, Proc. Natl. Acad. Sci. USA 86:8932-8935 (1989); Zijistra et al., Nature 342:435-438 (1989). In some embodiments, the expressed antibody is a single chain antibody; alternatively, the nucleic acid sequences include sequences encoding both the heavy and light chains, or fragments thereof, of the antibody.

[3204] Delivery of the nucleic acid molecules into a patient may be either direct, in which case the patient is directly exposed to the nucleic acid or nucleic acid-carrying vectors, or indirect, in which case, cells are first transformed with the nucleic acids in vitro, then transplanted into the patient. These two approaches are known, respectively, as in vivo or ex vivo gene therapy.

[3205] In a specific embodiment, the nucleic acid molecules are directly administered in vivo, where it is expressed to produce the encoded product. This can be accomplished by any of numerous methods known in the art, e.g., by constructing them as part of an appropriate nucleic acid expression vector and administering it so that they become intracellular, e.g., by infection using defective or attenuated retrovirals or other viral vectors (see U.S. Pat. No. 4,980,286), or by direct injection of naked DNA, or by use of microparticle bombardment (e.g., a gene gun; Biolistic, Dupont), or coating with lipids or cell-surface receptors or transfecting agents, encapsulation in liposomes, microparticles, or microcapsules, or by administering them in linkage to a peptide which is known to enter the nucleus, by administering it in linkage to a ligand subject to receptor-mediated endocytosis (see, e.g., Wu and Wu, J. Biol. Chem. 262:4429-4432 (1987)) (which can be used to target cell types specifically expressing the receptors), etc. In another embodiment, nucleic acid-ligand complexes can be formed in which the ligand comprises a fusogenic viral peptide to disrupt endosomes, allowing the nucleic acid to avoid lysosomal degradation. In yet another embodiment, the nucleic acid can be targeted in vivo for cell specific uptake and expression, by targeting a specific receptor (see, e.g., PCT Publications WO 92/06180; WO 92/22635; WO92/20316; WO93/14188, WO 93/20221). Alternatively, the nucleic acid can be introduced intracellularly and incorporated within host cell DNA for expression, by homologous recombination (Koller and Smithies, Proc. Natl. Acad. Sci. USA 86:8932-8935 (1989); Zijistra et al., Nature 342:435-438 (1989)).

[3206] In a specific embodiment, viral vectors that contain nucleic acid sequences encoding an antibody of the invention are used. For example, a retroviral vector can be used (see Miller et al., Meth. Enzymol. 217:581-599 (1993)). These retroviral vectors contain the components necessary for the correct packaging of the viral genome and integration into the host cell DNA. The nucleic acid molecules encoding the antibody to be used in gene therapy are cloned into one or more vectors, which facilitates the delivery of the gene into a patient. More detail about retroviral vectors can be found in Boesen et al., Biotherapy 6:291-302 (1994).

[3207] Adenoviruses may also be used in the present invention. Another approach to gene therapy involves transferring a gene to cells in tissue culture by such methods as electroporation, lipofection, calcium phosphate mediated transfection, or viral infection. Usually, the method of transfer includes the transfer of a selectable marker to the cells. The cells are then placed under selection to isolate those cells that have taken up and are expressing the transferred gene. Those cells are then delivered to a patient.

[3208] In this embodiment, the nucleic acid molecule is introduced into a cell prior to administration in vivo of the resulting recombinant cell. Such introduction can be carried out by any method known in the art, including but not limited to transfection, electroporation, microinjection, infection with a viral or bacteriophage vector containing the nucleic acid sequences, cell fusion, chromosome-mediated gene transfer, microcell-mediated gene transfer, spheroplast fusion, etc. Numerous techniques are known in the art for the introduction of foreign genes into cells (see, e.g., Loeffler and Behr, Meth. Enzymol. 217:599-618 (1993)) and may be used in accordance with the present invention, provided that the necessary developmental and physiological functions of the recipient cells are not disrupted. The technique should provide for the stable transfer of the nucleic acid to the cell, so that the nucleic acid is expressible by the cell and preferably heritable and expressible by its cell progeny. The resulting recombinant cells can be delivered to a patient by various methods known in the art. Recombinant blood cells (e.g., hematopoietic stem or progenitor cells) are preferably administered intravenously. The amount of cells envisioned for use depends on the desired effect, patient state, etc., and can be determined by one skilled in the art.

[3209] Cells into which a nucleic acid can be introduced for purposes of gene therapy encompass any desired, available cell type, and include but are not limited to epithelial cells, endothelial cells, keratinocytes, fibroblasts, muscle cells, hepatocytes; blood cells such as T lymphocytes, B lymphocytes, monocytes, macrophages, neutrophils, eosinophils, megakaryocytes, granulocytes; various stem or progenitor cells, in particular hematopoietic stem or progenitor cells, e.g., as obtained from bone marrow, umbilical cord blood, peripheral blood, fetal liver, etc.

[3210] In a one embodiment, the cell used for gene therapy is autologous to the patient. Nucleic acid sequences encoding an antibody of the present invention are introduced into the cells such that they are expressible by the cells or their progeny, and the recombinant cells are then administered in vivo for therapeutic effect. In a specific embodiment, stem or progenitor cells are used. Any stem and/or progenitor cells which can be isolated and maintained in vitro can potentially be used in accordance with this embodiment of the present invention (see e.g. PCT Publication WO 94/08598; Stemple and Anderson, Cell 71:973-985 (1992); Rheinwald, Meth. Cell Bio. 21A:229 (1980); and Pittelkow and Scott, Mayo Clinic Proc. 61:771 (1986)).

### Dosages

[3211] The compositions are to be used for in vivo administration to a subject by any available means, such as parenteral administration. For administration to a subject, a composition or medicament described herein can be sterile, which can readily accomplished by filtration through sterile filtration membranes, or other methods known to those of skill in the art. In one embodiment, a composition of medicament has been treated to be free of pyrogens or endotoxins. Testing pharmaceutical compositions or medicaments for pyrogens or endotoxins and preparing pharmaceutical compositions or medicaments free of pyrogens or endotoxins, or preparing pharmaceutical compositions or medicaments that have endotoxins at a clinically-acceptable level, are well understood to one of ordinary skill in the art. Commercial kits are available to test pharmaceutical compositions or medicaments for pyrogens or endotoxins.

[3212] The antibodies or antigen binding fragments thereof, describe herein, are formulated, dosed, and administered in a fashion consistent with good medical practice. Factors for consideration in this context include the particular disorder being treated, the particular subject being treated, the clinical condition of the individual subject, the cause of the disorder, the site of delivery of the agent, the method of administration, the scheduling of administration, and other factors known to medical practitioners. The “therapeutically effective amount” to be administered will be governed by such considerations, and refers to the minimum amount necessary to ameliorate, treat, or stabilize, the cancer; to increase the time until progression (duration of progression free survival) or to treat or prevent the occurrence or recurrence of a tumor, a dormant tumor, or a micrometastases. The antibodies or antigen binding fragment thereof, disclosed herein, is optionally formulated with one or more additional therapeutic agents currently used to prevent or treat cancer or a risk of developing a cancer. The effective amount of such other agents depends on the amount of antibody or antigen binding fragment thereof present in the formulation, the type of disorder or treatment, and other factors discussed above. These are generally used in the same dosages and with administration routes as used herein before or about from 1 to 99% of the heretofore employed dosages.

[3213] The dose of antibody may vary depending upon the age and the size of a subject to be administered, target disease, conditions, route of administration, and the like. The preferred dose is typically calculated according to body weight or body surface area. When an antibody or antigen binding fragment thereof disclosed herein is used for treating a condition or disease in an adult patient, it may be advantageous to intravenously administer the antibody of the present invention normally at a single dose of about 0.01 to about 20 mg/kg body weight, more preferably about 0.02 to about 7, about 0.03 to about 5, or about 0.05 to about 3 mg/kg, about 5 mg/kg, about 7.5 mg/kg, about 10 mg/kg, or about 15 mg/kg body weight. Depending on the severity of the condition, the frequency and the duration of the treatment can be adjusted. Effective dosages and schedules for administering may be determined empirically; for example, patient progress can be monitored by periodic assessment, and the dose adjusted accordingly. Moreover, interspecies scaling of dosages can be performed using well-known methods in the art (e.g., Mordenti et al., 1991, Pharmaceut. Res. 8:1351).

[3214] Advantageously, the pharmaceutical compositions for oral or parenteral use described above are prepared into dosage forms in a unit dose suited to fit a dose of the active ingredients. Such dosage forms in a unit dose include, for example, tablets, pills, capsules, injections (ampoules), suppositories, etc.

[3215] The administration can be, for example, by one or more separate administrations, or by continuous infusion. For repeated administrations over several days or longer, depending on the condition, the treatment is sustained until, for example, the cancer is treated, as measured by the methods known in the art. However, other dosage regimens can be useful. In one non-limiting example, an antibody or antigen binding fragment thereof, disclosed herein is administered once every week, every two weeks, or every three weeks, at a dose range from about 5 mg/kg to about 15 mg/kg, including but not limited to 5 mg/kg, 7.5 mg/kg, 10 mg/kg or 15 mg/kg. The progress of using the methods described herein can be easily monitored by conventional techniques and assays. The duration of a therapy using the methods described herein will continue for as long as medically indicated or until a desired therapeutic effect (e.g., those described herein) is achieved. In certain embodiments, the administration of one or more antibodies or antigen binding fragment thereof, or compositions, described herein, is continued for 1 month, 2 months, 4 months, 6 months, 8 months, 10 months, 1 year, 2 years, 3 years, 4 years, 5 years, 10 years, 20 years, or for a period of years up to the lifetime of the subject.

### Efficacy of Treatment

[3216] The efficacy of the treatment methods for cancer, comprising administering the antibodies or antigen binding fragment thereof, or pharmaceutical compositions of the present disclosure can be measured by various endpoints commonly used in evaluating cancer treatments, including but not limited to, tumor regression, tumor weight or size shrinkage, time to progression, duration of survival, progression free survival, overall response rate, duration of response, and quality of life. The antibodies or antigen binding fragments thereof disclosed herein can require unique measures and definitions of clinical responses to drugs. In the case of cancers, the therapeutically effective amount of the antibodies, antigen binding fragments thereof disclosed herein or compositions comprising the same can reduce the number of cancer cells; reduce the tumor size; inhibit (i.e., slow to some extent and preferably stop) cancer cell infiltration into peripheral organs; inhibit (i.e., slow to some extent and preferably stop) tumor metastasis; inhibit, to some extent, tumor growth; and/or relieve to some extent one or more of the symptoms associated with the disorder. To the extent the antibodies or antigen binding fragment thereof, disclosed herein, act to prevent growth and/or kill existing cancer cells; it can be cytostatic and/or cytotoxic. For cancer therapy, efficacy in vivo can, for example, be measured by assessing the duration of survival, duration of progression free survival (PFS), the response rates (RR), duration of response, and/or quality of life.

[3217] In those embodiments related to the treatment or prevention of bladder cancer (e.g., bladder urothelial carcinoma), symptoms associated with bladder cancer include, but are not limited to, lower back pain, blood in the urine, painful or frequent urination, and weight loss.

[3218] In those embodiments related to the treatment or prevention of brain cancer (e.g., low-grade glioma), symptoms associated with brain cancer include, but are not limited to, headaches, vomiting, and seizures. Visual loss can be caused by glioma of the optic nerve. Pain, weakness or numbness in the extremities can be caused by spinal cord glioma. Poor reasoning, inappropriate social behavior, personality changes, poor planning, lower inhibition, and decreased production of speech can occur, for example, due to tumor in the frontal lobe. Poor memory, loss of hearing, difficulty in language comprehension can occur, for example, due to tumor in the temporal lobe. Poor interpretation of languages and difficulty speaking, difficulty writing, drawing, naming, and recognizing, and poor spatial and visual perception can occur, for example, due to tumor in the parietal lobe. Poor balance, muscle movement, and posture can occur, for example, due to tumor in the cerebellum. Seizures, endocrine problems, respiratory changes, visual changes, headaches and partial paralysis can occur, for example, due to brain stem tumor.

[3219] In those embodiments related to the treatment or prevention of breast cancer, symptoms associated with breast cancer include, but are not limited to, new lumps in the breast or underarm (armpit); swelling of all or part of a breast (even if no distinct lump is felt), armpit, or collarbone; skin irritation or dimpling (sometimes looking like an orange peel), breast or nipple pain, nipple retraction (turning inward), redness, discoloration, scaliness, flaking, or thickening of the nipple or breast skin, nipple discharge (other than breast milk), tingling, itching, increased sensitivity, burning, pain, tenderness of the breast or nipple, and fibroadenoma.

[3220] In those embodiments related to the treatment or prevention of cervical cancer, symptoms associated with cervical cancer include, but are not limited to, blood spots or light bleeding between or following periods, menstrual bleeding that is longer and heavier than usual, bleeding after intercourse, douching, or a pelvic examination, increased vaginal discharge, pain during sexual intercourse, bleeding after menopause, and unexplained, persistent pelvic and/or back pain.

[3221] In those embodiments related to the treatment or prevention of cholangiocarcinoma, symptoms associated with cholangiocarcinoma include, but are not limited to, abdominal pain, yellowing of skin and the whites of eyes (jaundice), intensely itchy skin, white-colored stools, fatigue, unintended weight loss.

[3222] In those embodiments related to the treatment or prevention of colorectal cancer, symptoms associated with colorectal cancer include, but are not limited to, a change in bowel habits such as diarrhea, constipation, or narrowing of the stool that lasts for more than a few days, rectal bleeding, dark stools, or blood in the stool, cramping or gnawing stomach pain, decreased appetite, vomiting, weight loss, weakness and fatigue, Jaundice-yellowing of the skin and eyes, a feeling that the bowel does not empty properly after a bowel movement, blood in feces that makes stools look black, bright red blood coming from the rectum, pain and bloating in the abdomen, a feeling of fullness in the abdomen, even after not eating for a while, a lump in the abdomen or the back passage felt by your doctor, and unexplained iron deficiency in men, or in women after menopause.

[3223] In those embodiments related to the treatment or prevention of esophageal cancer, symptoms associated with esophageal cancer include, but are not limited to, dysphagia, vomiting, weight loss, cough, voice changes, pain and discomfort, acid reflux, chest pain, difficulty and pain with swallowing, enlarged lymph nodes around the collarbone, pain behind the breastbone or in the throat, nausea, regurgitation of food, and vomiting of blood.

[3224] In those embodiments related to the treatment or prevention of head and neck squamous cell carcinoma, symptoms associated with head and neck squamous cell carcinoma include, but are not limited to, swelling or a sore that does not heal; this is the most common symptom, red or white patch in the mouth, lump, bump, or mass in the head or neck area, with or without pain, persistent sore throat, foul mouth odor not explained by hygiene, hoarseness or change in voice, nasal obstruction or persistent nasal congestion, frequent nose bleeds and/or unusual nasal discharge, difficulty breathing, double vision, numbness or weakness of a body part in the head and neck region, pain or difficulty chewing, swallowing, or moving the jaw or tongue, jaw pain, blood in the saliva or phlegm, which is mucus discharged into the mouth from respiratory passages, loosening of teeth, dentures that no longer fit, unexplained weight loss, fatigue, and ear pain or infection.

[3225] In those embodiments related to the treatment or prevention of kidney cancer, symptoms associated with kidney cancer include, but are not limited to, blood in the urine, a lump in the abdomen, loss of appetite and/or unexpected weight loss, anemia, fatigue, a high temperature, heavy sweating, elevated blood calcium levels and hypertension.

[3226] In those embodiments related to the treatment or prevention of liver cancer, symptoms associated with liver cancer include, but are not limited to, abdominal discomfort, pain, and tenderness, yellowing of the skin and the whites of the eyes, which is called jaundice, white, chalky stools, nausea, vomiting, bruising or bleeding easily, weakness, fatigue, liver enlargement, itching, abdominal mass, fever, anemia, emesis, back pain, enlarged spleen, and swollen legs.

[3227] In those embodiments related to the treatment or prevention of lung cancer, symptoms associated with lung cancer include, but are not limited to coughing, especially if it persists or becomes intense, pain in the chest, shoulder, or back unrelated to pain from coughing, a change in color or volume of sputum, shortness of breath, changes in the voice or being hoarse, harsh sounds with each breath (stridor), recurrent lung problems, such as bronchitis or pneumonia, coughing up phlegm or mucus, especially if it is tinged with blood, coughing up blood, loss of appetite or unexplained weight loss, muscle wasting (also known as cachexia), fatigue, headaches, bone or joint pain, bone fractures not related to accidental injury, neurological symptoms, such as unsteady gait or memory loss, neck or facial swelling, general weakness, bleeding, blood clots, chest pain, bone pain, superior vena cava obstruction, and difficulty swallowing.

[3228] In those embodiments related to the treatment or prevention of mesothelioma, symptoms associated with mesothelioma include, but are not limited to, anemia, blood clotting disorder, bowel obstruction, chest pain, persistent dry cough, persistent raspy cough, coughing up blood (hemoptysis), shortness of breath (dyspnea), pain in the lower back or rib area, chest wall pain, painful breathing, development of lumps under the skin on the chest, difficulty with swallowing (dysphagia), night sweats, fever, nausea, unexplained weight loss, fatigue, swollen abdomen, abdomen effusion, pericardium effusion, peritoneal effusion, pleural effusion, or a combination thereof.

[3229] In some embodiments related to the treatment of a cystadenocarcinoma, the cancer comprises a serous cystadenocarcinoma such as, for example, an ovarian serous cystadenocarcinoma. In those embodiments related to the treatment or prevention of an ovarian serous cystadenocarcinoma, symptoms associated with an cystadenocarcinoma include, but are not limited to, abdominal pain, abdominal swelling, increased abdominal girth, bloating, ascites, nausea, vomiting, unusual bowel movement, anorexia, weight loss, fatigue, or a combination thereof.

[3230] In those embodiments related to the treatment or prevention of a pancreatic cancer such as, for example, a pancreatic adenocarcinoma (PAAD), symptoms associated with pancreatic cancer include, but are not limited to, abdominal pain, mid-back pain, boating, constipation, diarrhea, poor appetite, difficulty digesting food, nausea, vomiting, gall bladder enlargement, liver enlargement, blood clots, jaundice {e.g., dark urine, light colored greasy stools, itching skin, or a combination thereof), weight loss, or a combination thereof. Weight loss can arise from anorexia, maldigestion from pancreatic ductal obstruction, and cachexia. Occasionally, pancreatic duct obstruction can result in attacks of pancreatitis. Deep and superficial venous thrombosis is, in some embodiments, also a symptom of pancreatic cancer, and can be a sign of malignant disease. Gastric outlet obstruction with nausea and vomiting sometimes happens with more advanced disease. In some embodiments, symptoms of pancreatic cancer to be inhibited or treated using the compositions and methods described herein include, but are not limited to, panniculitis and depression. In some embodiments, symptoms of pancreatic cancer to be inhibited or treated using the compositions and methods described herein include, but are not limited to, diabetes mellitus and/or impaired glucose tolerance.

[3231] In those embodiments related to the treatment or prevention of a pheochromocytoma, paraganglioma, or a combination thereof, symptoms associated with a pheochromocytoma, a paraganglioma, or a combination thereof include, but are not limited to, high blood pressure, heavy sweating, headache, rapid heartbeat (tachycardia), tremors, paleness in the face (pallor), shortness of breath (dyspnea), anxiety or sense of doom, constipation, weight loss, flushed skin, sweating, or a combination thereof.

[3232] In those embodiments related to the treatment or prevention of a prostate adenocarcinoma, symptoms associated with a prostate adenocarcinoma include, but are not limited to, trouble urinating; decreased force or interrupted flow in the stream of urine; a need to urinate frequently, especially at night, some-times urgently; difficulty starting or holding back urination; blood in semen; blood in urine; discomfort in the pelvic area; bone pain (e.g., pain in the back, hips, thighs, pelvis, shoulders, or other bones); erectile dysfunction; painful or burning urination; a decrease in the amount of fluid ejaculated; painful ejaculation; swelling or fluid buildup in the legs or feet; unexplained weight loss; fatigue; change in bowel habits; pressure or pain in the rectum; or a combination thereof.

[3233] In those embodiments related to the treatment or prevention of a sarcoma, symptoms associated with a sarcoma include, but are not limited to, a new lump or a lump that's growing anywhere on a subject's body; abdominal pain; blood in stool or vomit; black, tarry stools; or a combination thereof. When sarcomas grow in the back of the abdomen (the retroperitoneum), symptoms may also, or alternatively, include, but are not limited to, blockage or bleeding of the stomach or bowels; pain from the sarcoma pressing on nerves, blood vessels, or nearby organs; or a combination thereof.

[3234] In those embodiments related to the treatment or prevention of a melanoma, symptoms associated with a melanoma such as a skin cutaneous melanoma include, but are not limited to, a change in an existing mole (e.g., a mole with an asymmetrical shape, an irregular border, changes in color, changes in diameter, an evolving mole, itchiness, bleeding, or a combination thereof); development of a new pigmented or unusual-looking growth on a subject's skin; a sore that doesn't heal; spread of pigment from the border of a spot into surrounding skin; redness or a new swelling beyond the border of a mole; change in sensation, such as itchiness, tenderness, or pain; change in the surface of a mole (e.g., scaliness, oozing, bleeding, or the appearance of a lump or bump); or a combination thereof.

[3235] In those embodiments related to the treatment or prevention of an adenocarcinoma such as, for example, a stomach adenocarcinoma, symptoms associated with the adenocarcinoma include, but are not limited to, fatigue; feeling bloated after eating; feeling full after eating small amounts of food; a sensation of being very full during meals; swallowing difficulties (dysphagia); frequent burping; persistent and/or severe heartburn; persistent and/or severe indigestion; unexplained and/or persistent nausea; stomach pain; pain in the breastbone; persistent vomiting; vomiting which contains blood; unintentional or unexpected weight loss; breathlessness; gastritis, inflammation of the lining of the stomach; anemia; a history of stomach ulcers; a buildup of fluid in the stomach which may cause the stomach to feel lumpy; black stools that contain blood; loss of appetite; or a combination thereof.

[3236] In those embodiments related to the treatment or prevention of testicular cancer, symptoms associated with testicular cancer include, but are not limited to, a lump or enlargement in either, or both, testicle(s); a feeling of heaviness in the scrotum; a dull ache in the abdomen, tenderness in the abdomen; pain in the abdomen; a dull ache in the groin; a sudden collection of fluid in the scrotum; pain or discomfort in a testicle; pain or discomfort in the scrotum; enlargement of the breast tissue; tenderness of the breast tissue; back pain, early puberty in boys; shortness of breath; chest pain; a cough; headaches, confusion, or a combination thereof.

[3237] In those embodiments related to the treatment or prevention of a carcinoma such as a thyroid carcinoma, symptoms associated with a carcinoma include, but are not limited to, a lump in the neck; swelling in the neck; pain in the neck, sometimes going up to the ears; pain in the throat; hoarseness that does not go away; voice changes that do not go away; difficulty swallowing; trouble breathing; a constant cough that is not due to a cold; swollen lymph nodes in the neck; or a combination thereof.

[3238] In those embodiments related to the treatment or prevention of a uterine cancer, symptoms associated with a uterine cancer such as a uterine carcinosarcoma (UCS), a uterine corpus endometrial carcinoma (UCEC), or a combination thereof, include, but are not limited to, abnormal bleeding or spotting; vaginal discharge; vaginal bleeding after menopause; bleeding between periods, pelvic pain; a pelvic mass; or a combination thereof.

[3239] In those embodiments related to the treatment or prevention of a uveal melanoma, symptoms associated with a uveal melanoma include, but are not limited to, a sensation of flashes or specks of dust in your vision (floaters); a growing dark spot on the iris; a change in the shape of the dark circle (pupil) at the center of an eye; poor or blurry vision in an eye; loss of peripheral vision; or a combination thereof.

[3240] In some embodiments, one or more symptoms of a cancer can be inhibited or treated using the compositions and methods described herein. In other embodiments, described herein are methods for increasing progression free survival of a human subject susceptible to or diagnosed with a cancer. Time to disease progression is defined as the time from administration of the drug until disease progression or death. In a preferred embodiment, the combination treatment of the invention using an antibody or antigen binding fragment thereof, disclosed herein, and one or more chemotherapeutic agents may significantly increase progression free survival by at least about 1 month, 1.2 months, 2 months, 2.4 months, 2.9 months, 3.5 months, such as by about 1 to about 5 months, when compared to a treatment with chemotherapy alone. In another embodiment, the methods described herein may significantly increase response rates in a group of human subjects susceptible to or diagnosed with a cancer that are treated with various therapeutics. Response rate is defined as the percentage of treated subjects who responded to the treatment. In one embodiment, the combination treatment described herein using an antibody or antigen binding fragment thereof, disclosed herein, such as a recombinant antibody or antigen binding fragment thereof, and one or more chemotherapeutic agents significantly increases response rate in the treated subject group compared to the group treated with chemotherapy alone.

[3241] For example, for pancreatic cancer therapies, CT is the standard method for measurement of tumor burden, and clinical trials usually use RECIST (response evaluation criteria in solid tumors) criteria to gauge tumor response. In some embodiments related to treatment can be used to predict treatment response or disease relapse.

[3242] As used herein, the terms “treat,” “treatment,” “treating,” or “amelioration” refer to therapeutic treatments, wherein the object is to reverse, alleviate, ameliorate, inhibit, slow down or stop the progression or severity of a condition associated with, a disease or disorder. The term “treating” includes reducing or alleviating at least one adverse effect or symptom of a condition, disease or disorder associated with a chronic immune condition, such as, but not limited to, a chronic infection or a cancer. Treatment is generally “effective” if one or more symptoms or clinical markers are reduced. Alternatively, treatment is “effective” if the progression of a disease is reduced or halted. That is, “treatment” includes not just the improvement of symptoms or markers, but also a cessation of at least slowing of progress or worsening of symptoms that would be expected in absence of treatment. Beneficial or desired clinical results include, but are not limited to, alleviation of one or more symptom(s), diminishment of extent of disease, stabilized (i.e., not worsening) state of disease, delay or slowing of disease progression, amelioration or palliation of the disease state, and remission (whether partial or total), whether detectable or undetectable. The term “treatment” of a disease also includes providing relief from the symptoms or side-effects of the disease (including palliative treatment).

[3243] For example, in some embodiments, the methods described herein comprise administering an effective amount of the antibodies or antigen binding fragment thereof, described herein, to a subject in order to alleviate a symptom of a cancer. As used herein, “alleviating a symptom of a cancer” is ameliorating or reducing any condition or symptom associated with the cancer. As compared with an equivalent untreated control, such reduction or degree of prevention is at least 5%, 10%, 20%, 40%, 50%, 60%, 80%, 90%, 95%, or 100% as measured by any standard technique. Ideally, the cancer is completely cleared as detected by any standard method known in the art, in which case the cancer is considered to have been treated. A patient who is being treated for a cancer is one who a medical practitioner has diagnosed as having such a condition. Diagnosis can be by any suitable means. Diagnosis and monitoring can involve, for example, detecting the level of cancer cells in a biological sample (for example, a tissue or lymph node biopsy, blood test, or urine test), detecting the level of a surrogate marker of the cancer in a biological sample, detecting symptoms associated with the specific cancer, or detecting immune cells involved in the immune response typical of such a cancer.

[3244] The term “effective amount” as used herein refers to the amount of an antibody or antigen binding fragment thereof or composition comprising the same needed to alleviate at least one or more symptom of the disease or disorder, and relates to a sufficient amount of pharmacological composition to provide the desired effect. The term “therapeutically effective amount” therefore refers to an amount of a recombinant antibody or antigen binding fragment thereof using the methods as disclosed herein, that is sufficient to effect a particular effect when administered to a typical subject. An effective amount as used herein would also include an amount sufficient to delay the development of a symptom of the disease, alter the course of a symptom disease (for example but not limited to, slow the progression of a symptom of the disease), or reverse a symptom of the disease. Thus, it is not possible to specify the exact “effective amount”. For any given case, however, an appropriate “effective amount” can be determined by one of ordinary skill in the art using only routine experimentation.

[3245] Effective amounts, toxicity, and therapeutic efficacy can be determined by standard pharmaceutical procedures in cell cultures or experimental animals, e.g., for determining the LD50 (the dose lethal to 50% of the population) and the ED50 (the dose therapeutically effective in 50% of the population). The dosage can vary depending upon the dosage form employed and the route of administration utilized. The dose ratio between toxic and therapeutic effects is the therapeutic index and can be expressed as the ratio LD50/ED50—Compositions and methods that exhibit large therapeutic indices are preferred. A therapeutically effective dose can be estimated initially from cell culture assays. Also, a dose can be formulated in animal models to achieve a circulating plasma concentration range that includes the IC50 (i.e., the concentration of the antibody or antigen binding fragment thereof), which achieves a half-maximal inhibition of symptoms as determined in cell culture, or in an appropriate animal model. Levels in plasma can be measured, for example, by high performance liquid chromatography. The effects of any particular dosage can be monitored by a suitable bioassay. The dosage can be determined by a physician and adjusted, as necessary, to suit observed effects of the treatment.

[3246] The treatment and/or prevention of cancer includes, but is not limited to, alleviating symptoms associated with cancer, the inhibition of the progression of cancer, the promotion of the regression of cancer, the promotion of the immune response, inhibition of tumor growth, inhibition of tumor size, inhibition of metastasis, inhibition of cancer cell growth, inhibition of cancer cell proliferation, or cause cancer cell death.

[3247] The terms “increased”, “increase”, or “enhance” are all used herein to generally mean an increase by a statically significant amount; for the avoidance of doubt, the terms “increased”, “increase”, or “enhance”, mean an increase of at least 10% as compared to a reference level, for example an increase of at least about 10%, at least about 20%, or at least about 30%, or at least about 40%, or at least about 50%, or at least about 60%, or at least about 70%, or at least about 80%, or at least about 90% or up to and including a 100% increase or any increase between 10-100% as compared to a reference level, or at least about a 2-fold, or at least about a 3-fold, or at least about a 4-fold, or at least about a 5-fold or at least about a 10-fold increase, or any increase between 2-fold and 10-fold or greater as compared to a reference level.

[3248] The terms, “decrease”, “reduce”, “reduction”, “lower” or “lowering,” or “inhibit” are all used herein generally to mean a decrease by a statistically significant amount. For example, “decrease”, “reduce”, “reduction”, or “inhibit” means a decrease by at least 10% as compared to a reference level, for example a decrease by at least about 20%, or at least about 30%, or at least about 40%, or at least about 50%, or at least about 60%, or at least about 70%, or at least about 80%, or at least about 90% or up to and including a 100% decrease (e.g., tumor size after treatment as compared to a reference level prior to the treatment), or any decrease between 10-100% as compared to a reference level. In the context of a marker or symptom, by these terms is meant a statistically significant decrease in such level. The decrease can be, for example, at least 10%, at least 20%, at least 30%, at least 40% or more, and is preferably down to a level accepted as within the range of normal for an individual without a given disease. Reduce or inhibit can refer to, for example, the symptoms of the disorder being treated, the presence or size of metastases or micrometastases, the size of the primary tumor, the presence or the size of the dormant tumor.

### Modes of Administration

[3249] The antibodies or antigen binding fragment thereof, described herein, can be administered to a subject in need thereof by any appropriate route which results in an effective treatment in the subject. As used herein, the terms “administering,” and “introducing” are used interchangeably and refer to the placement of an antibody or antibody portion thereof into a subject by a method or route which results in at least partial localization of such agents at a desired site, such as a site of inflammation or cancer, such that a desired effect(s) is produced.

[3250] In some embodiments, the antibodies or antigen binding fragment thereof, described herein, or compositions comprising the same is administered to a subject having a cancer, to be inhibited by any mode of administration that delivers the agent systemically or to a desired surface or target, and can include, but is not limited to, injection, infusion, instillation, and inhalation administration. Oral administration forms are also contemplated herein. “Injection” includes, without limitation, intravenous, intramuscular, intraarterial, intrathecal, intraventricular, intracapsular, intraorbital, intracardiac, intradermal, intraperitoneal, transtracheal, subcutaneous, subcuticular, intraarticular, sub capsular, subarachnoid, intracranial, intraspinal, intracerebro spinal, and intrasternal injection and infusion.

[3251] The phrases “parenteral administration” and “administered parenterally” as used herein, refer to modes of administration other than enteral and topical administration, usually by injection. The phrases “systemic administration,” “administered systemically”, “peripheral administration” and “administered peripherally” as used herein refer to the administration of the bispecific or multispecific polypeptide agent other than directly into a target site, tissue, or organ, such as a tumor site, such that it enters the subject's circulatory system and, thus, is subject to metabolism and other like processes.

[3252] In some embodiments, the antibodies, or antigen binding fragment thereof, described herein, or compositions comprising the same can be administered via intravenous administration as a bolus or by continuous infusion over a period of time, by intramuscular, intraperitoneal, intracerobrospinal, subcutaneous, intra-articular, intrasynovial, intrathecal, oral, topical, or inhalation routes. Local administration, for example, to a tumor or cancer site where angiogenesis is occurring, is particularly desired if extensive side effects or toxicity is associated with the use of the antibodies, or antigen binding fragment thereof, described herein, or compositions comprising the same. An ex vivo strategy can also be used for therapeutic applications in some embodiments. Ex vivo strategies involve transfecting or transducing cells obtained from a subject with a nucleic acid sequence, disclosed herein. The transfected or transduced cells are then returned to the subject. The cells can be any of a wide range of types including, without limitation, hematopoietic cells (e.g., bone marrow cells, macrophages, monocytes, dendritic cells, T cells, or B cells), fibroblasts, epithelial cells, endothelial cells, keratinocytes, or muscle cells.

[3253] In some embodiments, an antibody or antigen binding fragment thereof, disclosed herein, or a composition comprising the same is administered by any suitable means, including parenteral, subcutaneous, intraperitoneal, intrapulmonary, and intranasal, and, if desired for local immunosuppressive treatment, intralesional administration. Parenteral infusions include intramuscular, intravenous, intraarterial, intraperitoneal, or subcutaneous administration. In some embodiments, the antibody or antigen binding fragment thereof or compositions of the disclosure are suitably administered by pulse infusion, particularly with declining doses of the antibody. Preferably the dosing is given by injections, most preferably intravenous or subcutaneous injections, depending in part on whether the administration is brief or chronic. In some embodiments, the antibody or antigen binding fragment thereof or compositions of the disclosure are administered locally, e.g., by direct injections, when the disorder or location of the tumor permits, and the injections can be repeated periodically. In some embodiments, the antibody or antigen binding fragment thereof or compositions of the disclosure can also be delivered systemically to the subject or directly to the tumor cells, e.g., to a tumor or a tumor bed following surgical excision of the tumor, in order to prevent or reduce local recurrence or metastasis, for example of a dormant tumor or micrometastases.

[3254] Antibody-targeted sonoporation methods are contemplated for use in some embodiments of the methods for inhibiting tumors described herein, in order to enhance the efficacy and potency of the therapeutic compositions comprising antibodies and antigen binding fragment thereof provided herein. As used herein, “sonoporation” refers to the use of sound, preferably at ultrasonic frequencies, or the interaction of ultrasound with contrast agents (e.g., stabilized microbubbles) for temporarily modifying the permeability of cell plasma membranes, thus allowing uptake of large molecules, such as therapeutic agents. The membrane permeability caused by the sonoporation is transient, leaving the agents trapped inside the cell after the ultrasound exposure. Sonoporation employs acoustic cavitation of microbubbles to enhance delivery of large molecules.

[3255] Accordingly, in some embodiments of the methods, the antibody or antigen binding fragment thereof described herein, mixed with ultrasound contrast agents, such as microbubbles, can be injected locally or systemically into a subject in need of treatment for cancer, and ultrasound can be coupled and even focused into the defined area, e.g., tumor site, to achieve targeted delivery. In some embodiments, the methods use focused ultrasound methods to achieve targeted delivery. As used herein, HIFU or “High Intensity Focused Ultrasound” refers to a non-invasive therapeutic method using high-intensity ultrasound to heat and destroy malignant or pathogenic tissue without causing damage to overlying or surrounding health tissue. As described in Khaibullina et al., 49 J. Nucl. Med. 295 (2008), and WO 2010/127369, HIFU can also be used as a means of delivery of therapeutic agents, such as antibodies or antibody fragments thereof.

[3256] Methods using contrast-enhanced ultrasound (CEUS) are also contemplated for use with an antibody or antigen binding fragment thereof, described herein. Contrast-enhanced ultrasound (CEUS) refers to the application of ultrasound contrast medium and ultrasound contrast agents to traditional medical sonography. Ultrasound contrast agents refer to agents that rely on the different ways in which sound waves are reflected from interfaces between substances. A variety of microbubble contrast agents are available for use with the compositions and methods described herein. Microbubbles can differ in their shell makeup, gas core makeup, and whether or not they are targeted. Targeting ligands that bind to receptors characteristic of angiogenic disorders, can be conjugated to microbubbles, enabling the microbubble complex to accumulate selectively in areas of interest, such as diseased or abnormal tissues. This form of molecular imaging, known as targeted contrast-enhanced ultrasound, will only generate a strong ultrasound signal if targeted microbubbles bind in the area of interest. Targeted contrast-enhanced ultrasound has many applications in both medical diagnostics and medical therapeutics. In some embodiments, an antibody or antigen binding fragment thereof, described herein, is administered to a subject in need of treatment for a cancer or a tumor, using a targeted ultrasound delivery. Diagnostic Uses

[3257] Provided herein are methods of using the antibodies for detection, diagnosis and monitoring of a disease, disorder or condition associated with the antigen expression (either increased or decreased relative to a normal sample, and/or inappropriate expression, such as presence of expression in tissues(s) and/or cell(s) that normally lack the epitope expression). Provided herein are methods of determining whether a patient will respond to antibody therapy.

[3258] In some embodiments, the method comprises detecting whether the patient has cells that express target antigen using an antibody disclosed herein. In some embodiments, the method of detection comprises contacting the sample with an antibody or antigen binding fragment thereof of the disclosure, and determining whether the level of binding differs from that of a reference or comparison sample (such as a control). In some embodiments, the method may be useful to determine whether the antibodies or polypeptides described herein are an appropriate treatment for the subject. In some embodiments, the cells or cell/tissue lysate are contacted with an antibody and the binding between the antibody and the cell is determined. When the test cells show binding activity as compared to a reference cell of the same tissue type, it may indicate that the subject would benefit from treatment with an antibody. In some embodiments, the test cells are from human tissues. In some embodiments, the test cells are from human blood.

[3259] Various methods known in the art for detecting specific antibody-antigen binding can be used. Exemplary immunoassays which can be conducted include fluorescence polarization immunoassay (FPIA), fluorescence immunoassay (FIA), enzyme immunoassay (EIA), nephelometric inhibition immunoassay (NIA), enzyme linked immunosorbent assay (ELISA), and radioimmunoassay (RIA). An indicator moiety, or label group, can be attached to the subject antibodies and is selected so as to meet the needs of various uses of the method which are often dictated by the availability of assay equipment and compatible immunoassay procedures. Appropriate labels include, without limitation, radionuclides (for example 125I, 131I, 35S, 3H, or 32P), enzymes (for example, alkaline phosphatase, horseradish peroxidase, luciferase, or β-glactosidase), fluorescent moieties or proteins (for example, fluorescein, rhodamine, phycoerythrin, GFP, or BFP), or luminescent moieties (for example, Qdot™ nanoparticles supplied by the Quantum Dot Corporation, Palo Alto, Calif.). General techniques to be used in performing the various immunoassays noted above are known to those of ordinary skill in the art.

[3260] For purposes of diagnosis, the antibodies or antigen binding fragment thereof can be labeled with a detectable moiety including but not limited to radioisotopes, fluorescent labels, and various enzyme-substrate labels know in the art. Methods of conjugating labels to an antibody are known in the art. In some embodiments, the antibodies need not be labeled, and the presence thereof can be detected using a second labeled antibody which binds to the first antibody. The antibodies or antigen binding fragment thereof of the present invention may be used as affinity purification agents for a cancer associated antigen or in diagnostic assays for a cancer associated antigen protein, e.g., detecting its expression in specific cells, tissues, or serum. The antibodies or antigen binding fragment thereof, disclosed herein, may also be used for in vivo diagnostic assays. Generally, for these purposes the antibody is labeled with a radionuclide (such as ulIn, 99Tc, 14C, 131I, 12sI, 3H, 32p or 3sS) so that the tumor can be localized using immunoscintiography.

[3261] The antibodies of the present invention may be employed in any known assay method, such as competitive binding assays, direct and indirect sandwich assays, such as ELISAs, and immunoprecipitation assays. Zola, Monoclonal Antibodies: A Manual of Techniques, pp. 147-158 (CRC Press, Inc. 1987). The antibodies may also be used for immunohistochemistry, to label tumor samples using methods known in the art. As a matter of convenience, the antibody of the present invention can be provided in a kit, i.e., a packaged combination of reagents in predetermined amounts with instructions for performing the diagnostic assay. Where the antibody is labeled with an enzyme, the kit will include substrates and cofactors required by the enzyme (e.g., a substrate precursor which provides the detectable chromophore or fluorophore). In addition, other additives may be included such as stabilizers, buffers (e.g., a block buffer or lysis buffer) and the like. The relative amounts of the various reagents may be varied widely to provide for concentrations in solution of the reagents which substantially optimize the sensitivity of the assay. Particularly, the reagents may be provided as dry powders, usually lyophilized, including excipients which on dissolution will provide a reagent solution having the appropriate concentration.

### Kits

[3262] Provided herein are also kits, medicines, compositions, and unit dosage forms for use in any of the methods described herein. Provided herein is a kit comprising a therapeutically effective amount of at least one of the antibody or antigen binding fragment thereof disclosed herein. In some embodiments, the kit further comprises a second therapeutic agent (e.g., a chemotherapeutic agent). In some embodiments, the antibody or antigen binding fragment thereof is an aqueous form or a lyophilized form. The kit further comprises a diluent or a reconstitution solution.

[3263] Kits can include one or more containers comprising an antibody (or unit dosage forms and/or articles of manufacture). In some embodiments, a unit dosage is provided wherein the unit dosage contains a predetermined amount of a composition comprising an antibody (e.g., a therapeutically effective amount), with or without one or more additional agents. In some embodiments, such a unit dosage is supplied in single-use prefilled syringe for injection. In some embodiments, the composition comprising the antibody or antigen binding fragment thereof can comprise saline, sucrose, or the like; a buffer, such as phosphate, or the like; and/or be formulated within a stable and effective pH range. In some embodiments, the antibody or antigen binding fragment thereof can be provided as a lyophilized powder that may be reconstituted upon addition of an appropriate liquid, for example, sterile water. In some embodiments, the antibody or antigen binding fragment thereof further comprises one or more substances that inhibit protein aggregation, including, but not limited to, sucrose and arginine. In some embodiments, the antibody or antigen binding fragment thereof further comprises heparin and/or a proteoglycan.

[3264] In some embodiments, kits further comprise instructions for use in the treatment of cancer in accordance with any of the methods described herein. The kit may further comprise a description of selection an individual suitable or treatment. Instructions supplied in the kits are typically written instructions on a label or package insert (for example, a paper sheet included in the kit), but machine-readable instructions (for example, instructions carried on a magnetic or optical storage disk) are also acceptable. In some embodiments, the kit further comprises another therapeutic agent (e.g., an anti-cancer antibody or a chemotherapeutic agent)

[3265] The kits are in suitable packaging. Suitable packaging includes, but is not limited to, vials, bottles, jars, flexible packaging (for example, sealed Mylar or plastic bags), and the like. Kits may optionally provide additional components such as buffers and interpretative information. The present application thus also provides articles of manufacture, which include vials (such as sealed vials), bottles, jars, flexible packaging, and the like.

[3266] While certain embodiments of the present application have been shown and described herein, it will be obvious that such embodiments are provided by way of example only. Numerous variations, changes, and substitutions may occur to those skilled in the art without departing from the embodiments; it should be understood that various alternatives to the embodiments described herein may be employed in practicing the methods described herein.

### EXAMPLES

[3267] Provided below are exemplary methods for in silico reconstruction of consensus sequences of cancer associated antibodies. Also described herein are computational analytical approaches for estimation of immunoglobulin repertoire diversity and the identification of clonal rearranged immunoglobulin CDR3 sequences present in the repertoire. The approaches are contemplated for the reconstruction of complete consensus sequences of the variable heavy chain, variable light chain and the respective CDR3 of said immunoglobulins.

### Example 1: Estimation of the Immunoglobulin Repertoire Diversity

[3268] RNA-seq FASTQ files for 10177 TCGA patients representative of 30 cancer types collected by TCGA consortium (The Cancer Genome Atlas, NCI &NHGRI) were recorded and analyzed. RNA-seq samples (n=10177) were aligned to reference V, D and J genes of immunoglobulins in order to identify the repertoire present in the samples. Then, identical CDR3 sequences were identified and grouped in clonotypes. The information was exported into a tab-delimited and understandable text file (FIG. 1). From the initial 10177 samples, 4782 samples were eliminated for which there were no reads aligning to immunoglobulin heavy chain genes or the number of reads was lower than the downsampling threshold. In total, the information on immunoglobulin (Ig) diversity from 5395 samples was collected and analyzed.

[3269] VDJtools were used to filter out non-functional (non-coding) clonotypes and to compute basic diversity statistics. Non-functional clonotypes were identified as those containing a stop codon or frameshift in their receptor sequence. The diversity of the Ig repertoire was based on the corrected effective number of species which is calculated based on Chao et al., 2013, Methods in Ecology and Evolution, Volume 4, Issue 11. Here, the effective number of species refers the exponent of the Shannon-Wiener Entropy index such that a community of S species with species frequencies p1, pi, . . . , ps, then the diversity (D) is the exponent of the Shannon-Wiener Entropy index (H) given by:

$$D = exp ( H ) = exp ( - {\sum }_{i = 1}^{s} {p}_{i} ln {p}_{i} )$$

### Example 2: Identification of Clonal Immunoglobulin Sequences

[3270] The R software was used on the files obtained from the first alignment step to analyze which samples pass the clonality threshold (eHbc<20). Out of the 5395 samples, 598 pass this threshold. Next, we chose the samples with the correct pairing of heavy and light chains as the two top clonal chains that could be reliably identified. 271 samples were selected for further antibody reconstruction.

### Example 3: Alignment and Assembly of VDJ Sequences

[3271] Alignments were performed against the immunoglobulin segments identified by the first alignment step for viewing the results, allowing the exploration of the frequency distribution of sequence mismatches along the V, D, J gene segments and in particular in the CDR3 region length statistics. This alignment step was useful for summarizing repertoires, as well as offering a detailed view of rearrangements and region alignments for individual query sequences. More details about the alignment and assembly methodology are given in the Example 5 below.

[3272] In brief, the identified segments by first alignment step from IMGT were first provided using the reference files provided in the BraCeR tool. The heavy D segment and light V-J junction sequences were then reconstructed using an in-house built assembler (see EXAMPLE 5 for detailed description). A FASTA file with corrected heavy D and light V-J junction sequences was generated for each sample. In addition to the assembled FASTA files using IgBLAST v1.9.0 and IMGT database were also generated. The somatic FASTA sequence was inputed to IgBLAST and to obtain the closest segment ids for the heavy and light chain. The final assembled FASTA sequences served as ‘reference’ sequences for the alignment and visualization steps described below. Final ‘reconstructed’ nucleotide and amino acid consensus sequences of antibodies associated with a cancer are provided herein.

### Quality Control and Visual Confirmation of Alignments

[3273] Using the reference files generated from the assembly step, the FASTQs were aligned in BowTie2 default mode. The output BAM file can be used for IGV visualization and mutations in the patient can be observed.

[3274] Example alignments and corresponding hypermutations using BowTie2 with default parameters for 3 exemplary patients are shown in FIG. 2A-2F. The D segments of the heavy chain was identified using a custom local assembly tool and edited the corresponding part of the FASTA file, therefore, no mutations are shown in D segments of IGV plots.

### Example 4: Identification of Rearranged Immunoglobulin CDR3 Amino Acid Sequences

[3275] The identification of the CDR3 region and corresponding V, D, and J chains from the final assembled FASTA sequences was achieved with IgBLAST. The standardized output using version v.1.9.0 of IgBLAST was delivered by wrapping IgBLASTn with default parameters. The output from the IgBLAST service is extracted using a purpose-built parser tool designed to extract the CDR1, CDR2 and CDR3 nucleotide and amino acid sequences. Summary of identified nucleotide and amino acid consensus sequences for CDR3 for the selected tumor samples are provided herein.

### Example 5: VDJ Sequence Identification Workflow

[3276] VDJ Sequence identification workflow was used to determine somatic sequences of given patient and information such as CDR regions and mutation rates. The exemplary pipeline comprised of 3 steps (FIG. 3): Step 1: Pipeline P1: Somatic Sequence Identification; Step 2: Manual IGV Investigation and (if necessary) Correction of Somatic VDJ Sequence; and Step 3: Pipeline P2: CDR Regions Identification and Amino Acid Translation.

[3277] The workflow accepted 2 inputs for each target patient: (1) the TCGA Archive File: TCGA archive file of the patient. Prefixes of all output files were determined based on metadata (i.e. aliquot id) of patients' archive file; and (2) the preliminary alignment Output File: IG clones output of preliminary alignment were used to obtain initial segment id predictions. This text file included both heavy and light chain results.

[3278] By completing all three steps of the pipeline, the following output files were obtained: Somatic Sequence: A FASTA file for a given patient's identified VDJ sequence; The amino acid translation of Somatic FASTA files; IgBLAST output log for somatic FASTA file: Contains CDR regions; Alignment Logs: Visual text representation of the heavy D region and light V-J junction of somatic sequence (For validation purpose); and Pileup logs: Contains somatic mutation rate of segments and V-C segment coverage ratio of heavy and light chain which we use as an internal quality control metric.

### Step 1: Somatic Sequence Identification

[3279] The first step of the VDJ sequence identification workflow was the somatic sequence identification. For this purpose, two input were initially taken, which were the IG segments id identified during the first alignment step and the FASTQ file of the patient. Somatic sequence identification was performed in 3 sub-stages (FIG. 4).

### Assembly Stage

[3280] During the preliminary alignment step, the VDJC segment ids were identified for both heavy and light chain. Then with use of the segment ids and IMGT database, the heavy and light chain sequences were generated by appending segment sequences to form V(D)JC structure.

[3281] When the FASTQ of a patient was aligned with the reference FASTA generated by the first alignment step, it was often observed that D segment of the heavy chain (FIG. 5) did not properly align. One reason of observing a low coverage in these areas could be the high mutation rate of antibody construction. Somatic mutations in these two regions are high enough that during the alignment against IMGT reference, many reads were eliminated. In addition, sizes of the reads were typically small for TCGA patients (i.e., about 50 bp) which were harder to align to difficult (mutated) regions.

[3282] In order to identify the correct sequence in heavy D and light V-J junction, a custom assembly based algorithm was implemented. From the VDJ segments identified during the first alignment step, a 22 bp seed sequence was selected from the ending of V segments. From the end of V segment, the read length was read backwards. From that index, the next 22 bp was selected as the initial seed.

[3283] Once the seed sequence was selected, the FASTQ file was searched for the reads that contain this seed sequence. Since somatic mutations could occur, a fuzzy pattern searching algorithm was used (i.e., bitap algorithm) by allowing matches up to 4 edit distance penalty.

[3284] After the reads were selected in the first iteration, the unrelated ones were eliminated by comparing the whole read with V segment. The match ratio was checked of the intersection of reads and the V segment identified during the first alignment step. If the match ratio is less than 0.84, then the read was removed. Once the unrelated reads were removed, the reads were sorted descending by their match ratios and selected the first half of reads for pile up processing.

[3285] Using the selected reads, the bases were piled up and formed a single sequence. From the generated sequence, another 22 bp seed was selected and started a new iteration. For the following iterations, the maximum edit distance penalty was decreased to 1 and a read elimination was not performed in contrast to the first iteration. The iteration continued until a long enough final assembled sequence that covers more than half of the J segment was obtained (FIG. 6).

[3286] Once the assembled Heavy D region and Light V-J junction were obtained, the corresponding part of the reference was edited and produced an intermediate FASTA file for the alignment stage.

### Alignment Stage

[3287] After the difficult regions (i.e., heavy D and light V-J junction) were identified using a custom assembly method, the aim was to correct the remaining variants (i.e., variants seen in FIG. 7) by using a standard variant calling pipeline which involved aligning reads followed by variant calling operation. For this purpose, BowTie2 2.2.6 with default parameters was used. To decrease the size of the output BAM file, the unaligned reads were discarded from the BAM file. After that, Sambamba 0.5.9 was used to sort the output BAM file.

### Pileup Stage

[3288] In the third stage, rather than using a variant caller, the BAM file was used from the alignment stage do a pile-up processing to identify and correct variants in the reference file. For each position in the alignment, SNPs and INDELs were checked. Reads less than 20 quality threshold were ignored. In order to identify a variant in a specific position, 0.5 as the minimum ratio was applied, which meant that at least half of the total reads should contained that variant for the position. The variants in positions were also ignored where the total coverage is less than 200 reads. It was mostly observed that low coverage value in the first few base pairs of V segments and at the ending few base pairs of C segment.

### Mutation Rate Calculation

[3289] Once a final sequence was obtained, the sequence was compared with the initial reference file which the BAM file was generated from. The mutation rate was calculated as the Levenshtein Distance between segments divided by the Alignment Length of segments (i.e., Python Levenshtein.ratio (seql, seq2)).

### Coverage Ratio Between V and C Segments

[3290] The average coverage was checked between V and C segments of both chains as an internal quality control step to ensure that the patient was high clonal. In the pileup log file, if the coverage ratio was over 0.3 then this suggested high clonality. A high V/C ratio might not always mean that the patient is highly clonal. However, a low V/C ratio could be a strong sign for low clonality.

### Step 2: Manual IGV Inspection & Somatic Sequence Correction

[3291] Once the somatic FASTA files were obtained through step 1, the FASTA file was manually inspected using IGV browser. The IGV browser was check on whether it showed a variant in our somatic reference file. Bases were mostly corrected which were previously skipped due to the low number of reads in pileup stage of step 1.

### Step 3: Final CDR Regions Identification and Amino-Acid Translation

[3292] FIG. 8 illustrates detailed schema of CDR sequence identification and amino acid translation workflow. Once a final somatic sequence was identified in the first two steps, the reference was inputed to the IgBLAST tool to identify the closest segment ids from the IMGT database. IgBLAST also reported the positions of the CDR1, CDR2 and CDR3 sequences of the exemplary antibodies. Using those positions, the somatic sequence was clipped and the CDR regions returned with their amino acid translations. As a final step, the amino acid translation of reconstructed complete somatic VDJ consensus sequences was produced.

[3293] Exemplary reconstructed amino acid and nucleic acid consensus sequences of variable heavy chain, variable light chain and their corresponding CDR3 are provided herein.

### Example 6: Identification of Target Cancer Antigen

[3294] To determine the target antigen and specificity and affinity for an identified target antigen, antibodies described herein are analyzed using the High-Spec® cross-reactivity assay on HUPROT™ human proteome arrays, which contain the largest human protein collection on a single array. The HUPROT™ Human Proteome Microarray allows interactions between antibodies and candidate antigen proteins to be profiled in a high-throughput manner. The full-length recombinant candidate antigen proteins are expressed in the yeast S. cerevisiae, purified, and printed on glass slides in duplicate along with a set of control proteins (GST, BSA, histones, IgG, etc.). The HUPROT™ microarray is not restricted to a particular type of surface coating, although the default is glass coated with ultra-thin nitrocellulose film for the non-covalent, yet irreversible, capture of active proteins to the surface.

[3295] Antibody samples are probed on native HUPROT™ arrays at 1 μg/ml and incubated at room temperature for 1 hour. After probing, the arrays are washed according to the standard protocols and probed with Alexa-647-anti-human IgG Fc gamma specific secondary antibodies under conditions optimized for signal detection.

### Data Analysis

[3296] Non-specific hits that directly bind to the secondary antibodies are eliminated from the analysis of the samples. The specificity of each individual antibody sample to specific target antigen proteins on the array are quantified based on Z Scores.

[3297] Z score is the average Z score of the duplicate spots of a given protein (each protein is printed in duplicate on a HuProt™ array). The Z score of each spot on a given array is calculated according to the algorithm: Z=[F635−F635(avg)]/F635(std).

[3298] F635(avg) and F635(std) are the average and standard deviation of the F635 values of all spots on the array, respectively. S score is the difference of the Z Scores of a given protein and the one ranked next to it. If the S score of the top hit is >3, the antibody is considered as high specific against the top hit.

[3299] F635 is the average foreground signal intensity of 2 replicate spots of a given protein in the detection channel (635 nm). B635 is the average background signal intensity of 2 replicate spots of a given protein in the detection channel (635 nm). Range includes 3 numbers, the F635 values of the 2 replicate spots and the difference between them. If the difference is too high (compared to the F635 value), it indicates the 2 spots are not consistent and the hit may be less reliable. The non-specific hits bound by the secondary antibody are removed from the analysis of the samples.

[3300] Exemplary reconstructed amino acid and nucleic acid consensus sequences of variable heavy chain, variable light chain and their corresponding CDR3 are provided below.

Tabic 1 lists SEQ ID NOs of exemplar, amino acid sequences of heavy chain, light chain, and complementarity-determining regions of the antibodies disclosed herein or antigen binding fragment thereof. Corresponding amino acid sequences arc provided in the sequence listing submitted herewith

| | SEQ ID NO: | | | | | | | |
|---|---|---|---|---|---|---|---|---|
| | Variable | | | | | | | |
| | Region | | CDR1 | | CDR2 | | CDR3 | |
| | Heavy | Light | Heavy | Light | Heavy | | Heavy | |
| Antibody | chain | chain | chain | chain | chain | Light chain | chain | Light chain |
| name | (V_{H}) | (V_{L}) | (CDR-H1) | (CDR- L1) | CDR-H2 | (CDR-L2) | (CDR-H3) | (CDR-L3) |
| TBLA1001 | 1 | 272 | 543 | 814 | 1085 | 1356 | 1627 | 1898 |
| TBLA1002 | 2 | 273 | 544 | 815 | 1086 | 1357 | 1628 | 1899 |
| TBLA1003 | 3 | 274 | 545 | 816 | 1087 | 1358 | 1629 | 1900 |
| TBLA1004 | 4 | 275 | 546 | 817 | 1088 | 1359 | 1630 | 1901 |
| TBLA1005 | 5 | 276 | 547 | 818 | 1089 | 1360 | 1631 | 1902 |
| TBLA1006 | 6 | 277 | 548 | 819 | 1090 | 1361 | 1632 | 1903 |
| TBLA1007 | 7 | 278 | 549 | 820 | 1091 | 1362 | 1633 | 1904 |
| TBLA1008 | 8 | 279 | 550 | 821 | 1092 | 1363 | 1634 | 1905 |
| TBLA1009 | 9 | 280 | 551 | 822 | 1093 | 1364 | 1635 | 1906 |
| TBLA1010 | 10 | 281 | 552 | 823 | 1094 | 1365 | 1636 | 1907 |
| TBLA1011 | 11 | 282 | 553 | 824 | 1095 | 1366 | 1637 | 1908 |
| TBLA1012 | 12 | 283 | 554 | 825 | 1096 | 1367 | 1638 | 1909 |
| TBLA1013 | 13 | 284 | 555 | 826 | 1097 | 1368 | 1639 | 1910 |
| TBRE1001 | 14 | 285 | 556 | 827 | 1098 | 1369 | 1640 | 1911 |
| TBRE1002 | 15 | 286 | 557 | 828 | 1099 | 1370 | 1641 | 1912 |
| TBRE1003 | 16 | 287 | 558 | 829 | 1100 | 1371 | 1642 | 1913 |
| TBRE1004 | 17 | 288 | 559 | 830 | 1101 | 1372 | 1643 | 1914 |
| TBRE1005 | 18 | 289 | 560 | 831 | 1102 | 1373 | 1644 | 1915 |
| TBRE1006 | 19 | 290 | 561 | 832 | 1103 | 1374 | 1645 | 1916 |
| TBRE1007 | 20 | 291 | 562 | 833 | 1104 | 1375 | 1646 | 1917 |
| TBRE1008 | 21 | 292 | 563 | 834 | 1105 | 1376 | 1647 | 1918 |
| TBRE1009 | 22 | 293 | 564 | 835 | 1106 | 1377 | 1648 | 1919 |
| TBRE1010 | 23 | 294 | 565 | 836 | 1107 | 1378 | 1649 | 1920 |
| TBRE1011 | 24 | 295 | 566 | 837 | 1108 | 1379 | 1650 | 1921 |
| TBRE1012 | 25 | 296 | 567 | 838 | 1109 | 1380 | 1651 | 1922 |
| TBRE1013 | 26 | 297 | 568 | 839 | 1110 | 1381 | 1652 | 1923 |
| TBRE1014 | 27 | 298 | 569 | 840 | 1111 | 1382 | 1653 | 1924 |
| TBRE1015 | 28 | 299 | 570 | 841 | 1112 | 1383 | 1654 | 1925 |
| TBRE1016 | 29 | 300 | 571 | 842 | 1113 | 1384 | 1655 | 1926 |
| TBRE1017 | 30 | 301 | 572 | 843 | 1114 | 1385 | 1656 | 1927 |
| TBRE1018 | 31 | 302 | 573 | 844 | 1115 | 1386 | 1657 | 1928 |
| TBRE1019 | 32 | 303 | 574 | 845 | 1116 | 1387 | 1658 | 1929 |
| TBRE1020 | 33 | 304 | 575 | 846 | 1117 | 1388 | 1659 | 1930 |
| TBRE1021 | 34 | 305 | 576 | 847 | 1118 | 1389 | 1660 | 1931 |
| TBRE1022 | 35 | 306 | 577 | 848 | 1119 | 1390 | 1661 | 1932 |
| TBRE1023 | 36 | 307 | 578 | 849 | 1120 | 1391 | 1662 | 1933 |
| TBRE1024 | 37 | 308 | 579 | 850 | 1121 | 1392 | 1663 | 1934 |
| TBRE1025 | 38 | 309 | 580 | 851 | 1122 | 1393 | 1664 | 1935 |
| TBRE1026 | 39 | 310 | 581 | 852 | 1123 | 1394 | 1665 | 1936 |
| TBRE1027 | 40 | 311 | 582 | 853 | 1124 | 1395 | 1666 | 1937 |
| TBRE1028 | 41 | 312 | 583 | 854 | 1125 | 1396 | 1667 | 1938 |
| TBRE1029 | 42 | 313 | 584 | 855 | 1126 | 1397 | 1668 | 1939 |
| TBRE1030 | 43 | 314 | 585 | 856 | 1127 | 1398 | 1669 | 1940 |
| TBRE1031 | 44 | 315 | 586 | 857 | 1128 | 1399 | 1670 | 1941 |
| TBRE1032 | 45 | 316 | 587 | 858 | 1129 | 1400 | 1671 | 1942 |
| TBRE1033 | 46 | 317 | 588 | 859 | 1130 | 1401 | 1672 | 1943 |
| TBRE1034 | 47 | 318 | 589 | 860 | 1131 | 1402 | 1673 | 1944 |
| TBRE1035 | 48 | 319 | 590 | 861 | 1132 | 1403 | 1674 | 1945 |
| TBRE1036 | 49 | 320 | 591 | 862 | 1133 | 1404 | 1675 | 1946 |
| TBRE1037 | 50 | 321 | 592 | 863 | 1134 | 1405 | 1676 | 1947 |
| TBRE1038 | 51 | 322 | 593 | 864 | 1135 | 1406 | 1677 | 1948 |
| TBRE1039 | 52 | 323 | 594 | 865 | 1136 | 1407 | 1678 | 1949 |
| TBRE1040 | 53 | 324 | 595 | 866 | 1137 | 1408 | 1679 | 1950 |
| TBRE1041 | 54 | 325 | 596 | 867 | 1138 | 1409 | 1680 | 1951 |
| TBRE1042 | 55 | 326 | 597 | 868 | 1139 | 1410 | 1681 | 1952 |
| TBRE1043 | 56 | 327 | 598 | 869 | 1140 | 1411 | 1682 | 1953 |
| TBRE1044 | 57 | 328 | 599 | 870 | 1141 | 1412 | 1683 | 1954 |
| TBRE1045 | 58 | 329 | 600 | 871 | 1142 | 1413 | 1684 | 1955 |
| TBRE1046 | 59 | 330 | 601 | 872 | 1143 | 1414 | 1685 | 1956 |
| TBRE1047 | 60 | 331 | 602 | 873 | 1144 | 1415 | 1686 | 1957 |
| TBRE1048 | 61 | 332 | 603 | 874 | 1145 | 1416 | 1687 | 1958 |
| TBRE1049 | 62 | 333 | 604 | 875 | 1146 | 1417 | 1688 | 1959 |
| TBRE1050 | 63 | 334 | 605 | 876 | 1147 | 1418 | 1689 | 1960 |
| TBRE1051 | 64 | 335 | 606 | 877 | 1148 | 1419 | 1690 | 1961 |
| TBRE1052 | 65 | 336 | 607 | 878 | 1149 | 1420 | 1691 | 1962 |
| TBRE1053 | 66 | 337 | 608 | 879 | 1150 | 1421 | 1692 | 1963 |
| TBRE1054 | 67 | 338 | 609 | 880 | 1151 | 1422 | 1693 | 1964 |
| TBRE1055 | 68 | 339 | 610 | 881 | 1152 | 1423 | 1694 | 1965 |
| TBRE1056 | 69 | 340 | 611 | 882 | 1153 | 1424 | 1695 | 1966 |
| TBRE1057 | 70 | 341 | 612 | 883 | 1154 | 1425 | 1696 | 1967 |
| TBRE1058 | 71 | 342 | 613 | 884 | 1155 | 1426 | 1697 | 1968 |
| TCER1001 | 72 | 343 | 614 | 885 | 1156 | 1427 | 1698 | 1969 |
| TCER1002 | 73 | 344 | 615 | 886 | 1157 | 1428 | 1699 | 1970 |
| TCER1003 | 74 | 345 | 616 | 887 | 1158 | 1429 | 1700 | 1971 |
| TCER1004 | 75 | 346 | 617 | 888 | 1159 | 1430 | 1701 | 1972 |
| TCER1005 | 76 | 347 | 618 | 889 | 1160 | 1431 | 1702 | 1973 |
| TCER1006 | 77 | 348 | 619 | 890 | 1161 | 1432 | 1703 | 1974 |
| TCER1007 | 78 | 349 | 620 | 891 | 1162 | 1433 | 1704 | 1975 |
| TCHO1001 | 79 | 350 | 621 | 892 | 1163 | 1434 | 1705 | 1976 |
| TCOL1001 | 80 | 351 | 622 | 893 | 1164 | 1435 | 1706 | 1977 |
| TCOL1002 | 81 | 352 | 623 | 894 | 1165 | 1436 | 1707 | 1978 |
| TCOL1003 | 82 | 353 | 624 | 895 | 1166 | 1437 | 1708 | 1979 |
| TCOL1004 | 83 | 354 | 625 | 896 | 1167 | 1438 | 1709 | 1980 |
| TCOL1005 | 84 | 355 | 626 | 897 | 1168 | 1439 | 1710 | 1981 |
| TCOL1006 | 85 | 356 | 627 | 898 | 1169 | 1440 | 1711 | 1982 |
| TCOL1007 | 86 | 357 | 628 | 899 | 1170 | 1441 | 1712 | 1983 |
| TCOL1008 | 87 | 358 | 629 | 900 | 1171 | 1442 | 1713 | 1984 |
| TCOL1009 | 88 | 359 | 630 | 901 | 1172 | 1443 | 1714 | 1985 |
| TESO1001 | 89 | 360 | 631 | 902 | 1173 | 1444 | 1715 | 1986 |
| TESO1002 | 90 | 361 | 632 | 903 | 1174 | 1445 | 1716 | 1987 |
| TESO1003 | 91 | 362 | 633 | 904 | 1175 | 1446 | 1717 | 1988 |
| TESO1004 | 92 | 363 | 634 | 905 | 1176 | 1447 | 1718 | 1989 |
| TESO1005 | 93 | 364 | 635 | 906 | 1177 | 1448 | 1719 | 1990 |
| TESO1006 | 94 | 365 | 636 | 907 | 1178 | 1449 | 1720 | 1991 |
| TESO1007 | 95 | 366 | 637 | 908 | 1179 | 1450 | 1721 | 1992 |
| THNS1001 | 96 | 367 | 638 | 909 | 1180 | 1451 | 1722 | 1993 |
| THNS1002 | 97 | 368 | 639 | 910 | 1181 | 1452 | 1723 | 1994 |
| THNS1003 | 98 | 369 | 640 | 911 | 1182 | 1453 | 1724 | 1995 |
| THNS1004 | 99 | 370 | 641 | 912 | 1183 | 1454 | 1725 | 1996 |
| THNS1005 | 100 | 371 | 642 | 913 | 1184 | 1455 | 1726 | 1997 |
| THNS1006 | 101 | 372 | 643 | 914 | 1185 | 1456 | 1727 | 1998 |
| THNS1007 | 102 | 373 | 644 | 915 | 1186 | 1457 | 1728 | 1999 |
| THNS1008 | 103 | 374 | 645 | 916 | 1187 | 1458 | 1729 | 2000 |
| THNS1009 | 104 | 375 | 646 | 917 | 1188 | 1459 | 1730 | 2001 |
| THNS1010 | 105 | 376 | 647 | 918 | 1189 | 1460 | 1731 | 2002 |
| THNS1011 | 106 | 377 | 648 | 919 | 1190 | 1461 | 1732 | 2003 |
| THNS1012 | 107 | 378 | 649 | 920 | 1191 | 1462 | 1733 | 2004 |
| THNS1013 | 108 | 379 | 650 | 921 | 1192 | 1463 | 1734 | 2005 |
| THNS1014 | 109 | 380 | 651 | 922 | 1193 | 1464 | 1735 | 2006 |
| TKIC1001 | 110 | 381 | 652 | 923 | 1194 | 1465 | 1736 | 2007 |
| TKIC1002 | 111 | 382 | 653 | 924 | 1195 | 1466 | 1737 | 2008 |
| TKIC1003 | 112 | 383 | 654 | 925 | 1196 | 1467 | 1738 | 2009 |
| TKIC1004 | 113 | 384 | 655 | 926 | 1197 | 1468 | 1739 | 2010 |
| TKIC1005 | 114 | 385 | 656 | 927 | 1198 | 1469 | 1740 | 2011 |
| TKIC1006 | 115 | 386 | 657 | 928 | 1199 | 1470 | 1741 | 2012 |
| TKIC1007 | 116 | 387 | 658 | 929 | 1200 | 1471 | 1742 | 2013 |
| TKIC1008 | 117 | 388 | 659 | 930 | 1201 | 1472 | 1743 | 2014 |
| TKIC1009 | 118 | 389 | 660 | 931 | 1202 | 1473 | 1744 | 2015 |
| TKIC1010 | 119 | 390 | 661 | 932 | 1203 | 1474 | 1745 | 2016 |
| TKIC1011 | 120 | 391 | 662 | 933 | 1204 | 1475 | 1746 | 2017 |
| TKIC1012 | 121 | 392 | 663 | 934 | 1205 | 1476 | 1747 | 2018 |
| TKIC1013 | 122 | 393 | 664 | 935 | 1206 | 1477 | 1748 | 2019 |
| TKIC1014 | 123 | 394 | 665 | 936 | 1207 | 1478 | 1749 | 2020 |
| TKIC1015 | 124 | 395 | 666 | 937 | 1208 | 1479 | 1750 | 2021 |
| TKIC1016 | 125 | 396 | 667 | 938 | 1209 | 1480 | 1751 | 2022 |
| TKIC1017 | 126 | 397 | 668 | 939 | 1210 | 1481 | 1752 | 2023 |
| TKIC1018 | 127 | 398 | 669 | 940 | 1211 | 1482 | 1753 | 2024 |
| TKIC1019 | 128 | 399 | 670 | 941 | 1212 | 1483 | 1754 | 2025 |
| TKIC1020 | 129 | 400 | 671 | 942 | 1213 | 1484 | 1755 | 2026 |
| TKIP1001 | 130 | 401 | 672 | 943 | 1214 | 1485 | 1756 | 2027 |
| TKIP1002 | 131 | 402 | 673 | 944 | 1215 | 1486 | 1757 | 2028 |
| TKIP1003 | 132 | 403 | 674 | 945 | 1216 | 1487 | 1758 | 2029 |
| TKIP1004 | 133 | 404 | 675 | 946 | 1217 | 1488 | 1759 | 2030 |
| TKIP1005 | 134 | 405 | 676 | 947 | 1218 | 1489 | 1760 | 2031 |
| TKIP1006 | 135 | 406 | 677 | 948 | 1219 | 1490 | 1761 | 2032 |
| TLGG1001 | 136 | 407 | 678 | 949 | 1220 | 1491 | 1762 | 2033 |
| TLIV1001 | 137 | 408 | 679 | 950 | 1221 | 1492 | 1763 | 2034 |
| TLIV1002 | 138 | 409 | 680 | 951 | 1222 | 1493 | 1764 | 2035 |
| TLIV1003 | 139 | 410 | 681 | 952 | 1223 | 1494 | 1765 | 2036 |
| TLIV1004 | 140 | 411 | 682 | 953 | 1224 | 1495 | 1766 | 2037 |
| TLUA1001 | 141 | 412 | 683 | 954 | 1225 | 1496 | 1767 | 2038 |
| TLUA1002 | 142 | 413 | 684 | 955 | 1226 | 1497 | 1768 | 2039 |
| TLUA1003 | 143 | 414 | 685 | 956 | 1227 | 1498 | 1769 | 2040 |
| TLUA1004 | 144 | 415 | 686 | 957 | 1228 | 1499 | 1770 | 2041 |
| TLUA1005 | 145 | 416 | 687 | 958 | 1229 | 1500 | 1771 | 2042 |
| TLUA1006 | 146 | 417 | 688 | 959 | 1230 | 1501 | 1772 | 2043 |
| TLUA1007 | 147 | 418 | 689 | 960 | 1231 | 1502 | 1773 | 2044 |
| TLUA1008 | 148 | 419 | 690 | 961 | 1232 | 1503 | 1774 | 2045 |
| TLUA1009 | 149 | 420 | 691 | 962 | 1233 | 1504 | 1775 | 2046 |
| TLUA1010 | 150 | 421 | 692 | 963 | 1234 | 1505 | 1776 | 2047 |
| TLUA1011 | 151 | 422 | 693 | 964 | 1235 | 1506 | 1777 | 2048 |
| TLUA1012 | 152 | 423 | 694 | 965 | 1236 | 1507 | 1778 | 2049 |
| TLUA1013 | 153 | 424 | 695 | 966 | 1237 | 1508 | 1779 | 2050 |
| TLUA1014 | 154 | 425 | 696 | 967 | 1238 | 1509 | 1780 | 2051 |
| TLUA1015 | 155 | 426 | 697 | 968 | 1239 | 1510 | 1781 | 2052 |
| TLUA1016 | 156 | 427 | 698 | 969 | 1240 | 1511 | 1782 | 2053 |
| TLUA1017 | 157 | 428 | 699 | 970 | 1241 | 1512 | 1783 | 2054 |
| TLUA1018 | 158 | 429 | 700 | 971 | 1242 | 1513 | 1784 | 2055 |
| TLUS1001 | 159 | 430 | 701 | 972 | 1243 | 1514 | 1785 | 2056 |
| TLUS1002 | 160 | 431 | 702 | 973 | 1244 | 1515 | 1786 | 2057 |
| TLUS1003 | 161 | 432 | 703 | 974 | 1245 | 1516 | 1787 | 2058 |
| TLUS1004 | 162 | 433 | 704 | 975 | 1246 | 1517 | 1788 | 2059 |
| TLUS1005 | 163 | 434 | 705 | 976 | 1247 | 1518 | 1789 | 2060 |
| TLUS1006 | 164 | 435 | 706 | 977 | 1248 | 1519 | 1790 | 2061 |
| TLUS1007 | 165 | 436 | 707 | 978 | 1249 | 1520 | 1791 | 2062 |
| TLUS1008 | 166 | 437 | 708 | 979 | 1250 | 1521 | 1792 | 2063 |
| TLUS1009 | 167 | 438 | 709 | 980 | 1251 | 1522 | 1793 | 2064 |
| TLUS1010 | 168 | 439 | 710 | 981 | 1252 | 1523 | 1794 | 2065 |
| TLUS1011 | 169 | 440 | 711 | 982 | 1253 | 1524 | 1795 | 2066 |
| TMEL1015 | 170 | 441 | 712 | 983 | 1254 | 1525 | 1796 | 2067 |
| TMEL1016 | 171 | 442 | 713 | 984 | 1255 | 1526 | 1797 | 2068 |
| TMEL1017 | 172 | 443 | 714 | 985 | 1256 | 1527 | 1798 | 2069 |
| TMEL1018 | 173 | 444 | 715 | 986 | 1257 | 1528 | 1799 | 2070 |
| TMEL1019 | 174 | 445 | 716 | 987 | 1258 | 1529 | 1800 | 2071 |
| TMEL1020 | 175 | 446 | 717 | 988 | 1259 | 1530 | 1801 | 2072 |
| TMEL1021 | 176 | 447 | 718 | 989 | 1260 | 1531 | 1802 | 2073 |
| TMEL1022 | 177 | 448 | 719 | 990 | 1261 | 1532 | 1803 | 2074 |
| TMEL1023 | 178 | 449 | 720 | 991 | 1262 | 1533 | 1804 | 2075 |
| TMEL1024 | 179 | 450 | 721 | 992 | 1263 | 1534 | 1805 | 2076 |
| TMEL1025 | 180 | 451 | 722 | 993 | 1264 | 1535 | 1806 | 2077 |
| TMEL1026 | 181 | 452 | 723 | 994 | 1265 | 1536 | 1807 | 2078 |
| TMEL1027 | 182 | 453 | 724 | 995 | 1266 | 1537 | 1808 | 2079 |
| TMEL1028 | 183 | 454 | 725 | 996 | 1267 | 1538 | 1809 | 2080 |
| TMEL1029 | 184 | 455 | 726 | 997 | 1268 | 1539 | 1810 | 2081 |
| TMEL1030 | 185 | 456 | 727 | 998 | 1269 | 1540 | 1811 | 2082 |
| TMEL1031 | 186 | 457 | 728 | 999 | 1270 | 1541 | 1812 | 2083 |
| TMEL1032 | 187 | 458 | 729 | 1000 | 1271 | 1542 | 1813 | 2084 |
| TMEL1033 | 188 | 459 | 730 | 1001 | 1272 | 1543 | 1814 | 2085 |
| TMEL1034 | 189 | 460 | 731 | 1002 | 1273 | 1544 | 1815 | 2086 |
| TMEL1035 | 190 | 461 | 732 | 1003 | 1274 | 1545 | 1816 | 2087 |
| TMEL1036 | 191 | 462 | 733 | 1004 | 1275 | 1546 | 1817 | 2088 |
| TMEL1037 | 192 | 463 | 734 | 1005 | 1276 | 1547 | 1818 | 2089 |
| TMEL1038 | 193 | 464 | 735 | 1006 | 1277 | 1548 | 1819 | 2090 |
| TMEL1039 | 194 | 465 | 736 | 1007 | 1278 | 1549 | 1820 | 2091 |
| TMEL1040 | 195 | 466 | 737 | 1008 | 1279 | 1550 | 1821 | 2092 |
| TMEL1041 | 196 | 467 | 738 | 1009 | 1280 | 1551 | 1822 | 2093 |
| TMES1001 | 197 | 468 | 739 | 1010 | 1281 | 1552 | 1823 | 2094 |
| TMES1002 | 198 | 469 | 740 | 1011 | 1282 | 1553 | 1824 | 2095 |
| TMES1003 | 199 | 470 | 741 | 1012 | 1283 | 1554 | 1825 | 2096 |
| TMES1004 | 200 | 471 | 742 | 1013 | 1284 | 1555 | 1826 | 2097 |
| TOVA1001 | 201 | 472 | 743 | 1014 | 1285 | 1556 | 1827 | 2098 |
| TOVA1002 | 202 | 473 | 744 | 1015 | 1286 | 1557 | 1828 | 2099 |
| TOVA1003 | 203 | 474 | 745 | 1016 | 1287 | 1558 | 1829 | 2100 |
| TOVA1004 | 204 | 475 | 746 | 1017 | 1288 | 1559 | 1830 | 2101 |
| TOVA1005 | 205 | 476 | 747 | 1018 | 1289 | 1560 | 1831 | 2102 |
| TOVA1006 | 206 | 477 | 748 | 1019 | 1290 | 1561 | 1832 | 2103 |
| TOVA1007 | 207 | 478 | 749 | 1020 | 1291 | 1562 | 1833 | 2104 |
| TOVA1008 | 208 | 479 | 750 | 1021 | 1292 | 1563 | 1834 | 2105 |
| TPAN1001 | 209 | 480 | 751 | 1022 | 1293 | 1564 | 1835 | 2106 |
| TPAN1002 | 210 | 481 | 752 | 1023 | 1294 | 1565 | 1836 | 2107 |
| TPAN1003 | 211 | 482 | 753 | 1024 | 1295 | 1566 | 1837 | 2108 |
| TPAN1004 | 212 | 483 | 754 | 1025 | 1296 | 1567 | 1838 | 2109 |
| TPAN1005 | 213 | 484 | 755 | 1026 | 1297 | 1568 | 1839 | 2110 |
| TPAN1006 | 214 | 485 | 756 | 1027 | 1298 | 1569 | 1840 | 2111 |
| TPAN1007 | 215 | 486 | 757 | 1028 | 1299 | 1570 | 1841 | 2112 |
| TPHE1001 | 216 | 487 | 758 | 1029 | 1300 | 1571 | 1842 | 2113 |
| TPRO1001 | 217 | 488 | 759 | 1030 | 1301 | 1572 | 1843 | 2114 |
| TPRO1002 | 218 | 489 | 760 | 1031 | 1302 | 1573 | 1844 | 2115 |
| TPRO1003 | 219 | 490 | 761 | 1032 | 1303 | 1574 | 1845 | 2116 |
| TREC1001 | 220 | 491 | 762 | 1033 | 1304 | 1575 | 1846 | 2117 |
| TREC1002 | 221 | 492 | 763 | 1034 | 1305 | 1576 | 1847 | 2118 |
| TREC1003 | 222 | 493 | 764 | 1035 | 1306 | 1577 | 1848 | 2119 |
| TSAR1001 | 223 | 494 | 765 | 1036 | 1307 | 1578 | 1849 | 2120 |
| TSAR1002 | 224 | 495 | 766 | 1037 | 1308 | 1579 | 1850 | 2121 |
| TSAR1003 | 225 | 496 | 767 | 1038 | 1309 | 1580 | 1851 | 2122 |
| TSAR1004 | 226 | 497 | 768 | 1039 | 1310 | 1581 | 1852 | 2123 |
| TSAR1005 | 227 | 498 | 769 | 1040 | 1311 | 1582 | 1853 | 2124 |
| TSAR1006 | 228 | 499 | 770 | 1041 | 1312 | 1583 | 1854 | 2125 |
| TSAR1007 | 229 | 500 | 771 | 1042 | 1313 | 1584 | 1855 | 2126 |
| TSAR1008 | 230 | 501 | 772 | 1043 | 1314 | 1585 | 1856 | 2127 |
| TSTO1001 | 231 | 502 | 773 | 1044 | 1315 | 1586 | 1857 | 2128 |
| TSTO1002 | 232 | 503 | 774 | 1045 | 1316 | 1587 | 1858 | 2129 |
| TSTO1003 | 233 | 504 | 775 | 1046 | 1317 | 1588 | 1859 | 2130 |
| TSTO1004 | 234 | 505 | 776 | 1047 | 1318 | 1589 | 1860 | 2131 |
| TSTO1005 | 235 | 506 | 777 | 1048 | 1319 | 1590 | 1861 | 2132 |
| TSTO1006 | 236 | 507 | 778 | 1049 | 1320 | 1591 | 1862 | 2133 |
| TSTO1007 | 237 | 508 | 779 | 1050 | 1321 | 1592 | 1863 | 2134 |
| TSTO1008 | 238 | 509 | 780 | 1051 | 1322 | 1593 | 1864 | 2135 |
| TSTO1009 | 239 | 510 | 781 | 1052 | 1323 | 1594 | 1865 | 2136 |
| TSTO1010 | 240 | 511 | 782 | 1053 | 1324 | 1595 | 1866 | 2137 |
| TTES1001 | 241 | 512 | 783 | 1054 | 1325 | 1596 | 1867 | 2138 |
| TTES1002 | 242 | 513 | 784 | 1055 | 1326 | 1597 | 1868 | 2139 |
| TTES1003 | 243 | 514 | 785 | 1056 | 1327 | 1598 | 1869 | 2140 |
| TTES1004 | 244 | 515 | 786 | 1057 | 1328 | 1599 | 1870 | 2141 |
| TTES1005 | 245 | 516 | 787 | 1058 | 1329 | 1600 | 1871 | 2142 |
| TTES1006 | 246 | 517 | 788 | 1059 | 1330 | 1601 | 1872 | 2143 |
| TTES1007 | 247 | 518 | 789 | 1060 | 1331 | 1602 | 1873 | 2144 |
| TTES1008 | 248 | 519 | 790 | 1061 | 1332 | 1603 | 1874 | 2145 |
| TTES1009 | 249 | 520 | 791 | 1062 | 1333 | 1604 | 1875 | 2146 |
| TTES1010 | 250 | 521 | 792 | 1063 | 1334 | 1605 | 1876 | 2147 |
| TTES1011 | 251 | 522 | 793 | 1064 | 1335 | 1606 | 1877 | 2148 |
| TTES1012 | 252 | 523 | 794 | 1065 | 1336 | 1607 | 1878 | 2149 |
| TTHY1001 | 253 | 524 | 795 | 1066 | 1337 | 1608 | 1879 | 2150 |
| TTHY1002 | 254 | 525 | 796 | 1067 | 1338 | 1609 | 1880 | 2151 |
| TTHY1003 | 255 | 526 | 797 | 1068 | 1339 | 1610 | 1881 | 2152 |
| TTHY1004 | 256 | 527 | 798 | 1069 | 1340 | 1611 | 1882 | 2153 |
| TUCE1001 | 257 | 528 | 799 | 1070 | 1341 | 1612 | 1883 | 2154 |
| TUCE1002 | 258 | 529 | 800 | 1071 | 1342 | 1613 | 1884 | 2155 |
| TUCE1003 | 259 | 530 | 801 | 1072 | 1343 | 1614 | 1885 | 2156 |
| TUCE1004 | 260 | 531 | 802 | 1073 | 1344 | 1615 | 1886 | 2157 |
| TUCE1005 | 261 | 532 | 803 | 1074 | 1345 | 1616 | 1887 | 2158 |
| TUCE1006 | 262 | 533 | 804 | 1075 | 1346 | 1617 | 1888 | 2159 |
| TUCE1007 | 263 | 534 | 805 | 1076 | 1347 | 1618 | 1889 | 2160 |
| TUCE1008 | 264 | 535 | 806 | 1077 | 1348 | 1619 | 1890 | 2161 |
| TUCE1009 | 265 | 536 | 807 | 1078 | 1349 | 1620 | 1891 | 2162 |
| TUCE1010 | 266 | 537 | 808 | 1079 | 1350 | 1621 | 1892 | 2163 |
| TUCS1001 | 267 | 538 | 809 | 1080 | 1351 | 1622 | 1893 | 2164 |
| TUCS1002 | 268 | 539 | 810 | 1081 | 1352 | 1623 | 1894 | 2165 |
| TUCS1003 | 269 | 540 | 811 | 1082 | 1353 | 1624 | 1895 | 2166 |
| TUVM1001 | 270 | 541 | 812 | 1083 | 1354 | 1625 | 1896 | 2167 |
| TUVM1002 | 271 | 542 | 813 | 1084 | 1355 | 1626 | 1897 | 2168 |

Table 2 lists SEQ ID NOs of exemplary nucleic acid sequences of heavy chain, light chain, and complementarity-determining regions of the antibodies disclosed herein or antigen binding fragment thereof. Corresponding nucleic acid sequences are provided in the sequence listing submitted herewith

| | SEQ ID NO: | | | | | | | |
|---|---|---|---|---|---|---|---|---|
| | Variable | | | | | | | |
| | Region | | CDR1 | | CDR2 | | CDR3 | |
| | Heavy | Light | Heavy | Light | Heavy | Light | Heavy | Light |
| Antibody | chain | chain | chain | chain | chain | chain | chain | chain |
| name | (V_{H}) | (V_{L}) | (CDR-H1) | (CDR-L1) | (CDR-H2) | (CDR-L2) | (CDR-H3) | (CDR-L3) |
| TBLA1001 | 2169 | 2440 | 2711 | 2982 | 3253 | 3524 | 3795 | 4066 |
| TBLA1002 | 2170 | 2441 | 2712 | 2983 | 3254 | 3525 | 3796 | 4067 |
| TBLA1003 | 2171 | 2442 | 2713 | 2984 | 3255 | 3526 | 3797 | 4068 |
| TBLA1004 | 2172 | 2443 | 2714 | 2985 | 3256 | 3527 | 3798 | 4069 |
| TBLA1005 | 2173 | 2444 | 2715 | 2986 | 3257 | 3528 | 3799 | 4070 |
| TBLA1006 | 2174 | 2445 | 2716 | 2987 | 3258 | 3529 | 3800 | 4071 |
| TBLA1007 | 2175 | 2446 | 2717 | 2988 | 3259 | 3530 | 3801 | 4072 |
| TBLA1008 | 2176 | 2447 | 2718 | 2989 | 3260 | 3531 | 3802 | 4073 |
| TBLA1009 | 2177 | 2448 | 2719 | 2990 | 3261 | 3532 | 3803 | 4074 |
| TBLA1010 | 2178 | 2449 | 2720 | 2991 | 3262 | 3533 | 3804 | 4075 |
| TBLA1011 | 2179 | 2450 | 2721 | 2992 | 3263 | 3534 | 3805 | 4076 |
| TBLA1012 | 2180 | 2451 | 2722 | 2993 | 3264 | 3535 | 3806 | 4077 |
| TBLA1013 | 2181 | 2452 | 2723 | 2994 | 3265 | 3536 | 3807 | 4078 |
| TBRE1001 | 2182 | 2453 | 2724 | 2995 | 3266 | 3537 | 3808 | 4079 |
| TBRE1002 | 2183 | 2454 | 2725 | 2996 | 3267 | 3538 | 3809 | 4080 |
| TBRE1003 | 2184 | 2455 | 2726 | 2997 | 3268 | 3539 | 3810 | 4081 |
| TBRE1004 | 2185 | 2456 | 2727 | 2998 | 3269 | 3540 | 3811 | 4082 |
| TBRE1005 | 2186 | 2457 | 2728 | 2999 | 3270 | 3541 | 3812 | 4083 |
| TBRE1006 | 2187 | 2458 | 2729 | 3000 | 3271 | 3542 | 3813 | 4084 |
| TBRE1007 | 2188 | 2459 | 2730 | 3001 | 3272 | 3543 | 3814 | 4085 |
| TBRE1008 | 2189 | 2460 | 2731 | 3002 | 3273 | 3544 | 3815 | 4086 |
| TBRE1009 | 2190 | 2461 | 2732 | 3003 | 3274 | 3545 | 3816 | 4087 |
| TBRE1010 | 2191 | 2462 | 2733 | 3004 | 3275 | 3546 | 3817 | 4088 |
| TBRE1011 | 2192 | 2463 | 2734 | 3005 | 3276 | 3547 | 3818 | 4089 |
| TBRE1012 | 2193 | 2464 | 2735 | 3006 | 3277 | 3548 | 3819 | 4090 |
| TBRE1013 | 2194 | 2465 | 2736 | 3007 | 3278 | 3549 | 3820 | 4091 |
| TBRE1014 | 2195 | 2466 | 2737 | 3008 | 3279 | 3550 | 3821 | 4092 |
| TBRE1015 | 2196 | 2467 | 2738 | 3009 | 3280 | 3551 | 3822 | 4093 |
| TBRE1016 | 2197 | 2468 | 2739 | 3010 | 3281 | 3552 | 3823 | 4094 |
| TBRE1017 | 2198 | 2469 | 2740 | 3011 | 3282 | 3553 | 3824 | 4095 |
| TBRE1018 | 2199 | 2470 | 2741 | 3012 | 3283 | 3554 | 3825 | 4096 |
| TBRE1019 | 2200 | 2471 | 2742 | 3013 | 3284 | 3555 | 3826 | 4097 |
| TBRE1020 | 2201 | 2472 | 2743 | 3014 | 3285 | 3556 | 3827 | 4098 |
| TBRE1021 | 2202 | 2473 | 2744 | 3015 | 3286 | 3557 | 3828 | 4099 |
| TBRE1022 | 2203 | 2474 | 2745 | 3016 | 3287 | 3558 | 3829 | 4100 |
| TBRE1023 | 2204 | 2475 | 2746 | 3017 | 3288 | 3559 | 3830 | 4101 |
| TBRE1024 | 2205 | 2476 | 2747 | 3018 | 3289 | 3560 | 3831 | 4102 |
| TBRE1025 | 2206 | 2477 | 2748 | 3019 | 3290 | 3561 | 3832 | 4103 |
| TBRE1026 | 2207 | 2478 | 2749 | 3020 | 3291 | 3562 | 3833 | 4104 |
| TBRE1027 | 2208 | 2479 | 2750 | 3021 | 3292 | 3563 | 3834 | 4105 |
| TBRE1028 | 2209 | 2480 | 2751 | 3022 | 3293 | 3564 | 3835 | 4106 |
| TBRE1029 | 2210 | 2481 | 2752 | 3023 | 3294 | 3565 | 3836 | 4107 |
| TBRE1030 | 2211 | 2482 | 2753 | 3024 | 3295 | 3566 | 3837 | 4108 |
| TBRE1031 | 2212 | 2483 | 2754 | 3025 | 3296 | 3567 | 3838 | 4109 |
| TBRE1032 | 2213 | 2484 | 2755 | 3026 | 3297 | 3568 | 3839 | 4110 |
| TBRE1033 | 2214 | 2485 | 2756 | 3027 | 3298 | 3569 | 3840 | 4111 |
| TBRE1034 | 2215 | 2486 | 2757 | 3028 | 3299 | 3570 | 3841 | 4112 |
| TBRE1035 | 2216 | 2487 | 2758 | 3029 | 3300 | 3571 | 3842 | 4113 |
| TBRE1036 | 2217 | 2488 | 2759 | 3030 | 3301 | 3572 | 3843 | 4114 |
| TBRE1037 | 2218 | 2489 | 2760 | 3031 | 3302 | 3573 | 3844 | 4115 |
| TBRE1038 | 2219 | 2490 | 2761 | 3032 | 3303 | 3574 | 3845 | 4116 |
| TBRE1039 | 2220 | 2491 | 2762 | 3033 | 3304 | 3575 | 3846 | 4117 |
| TBRE1040 | 2221 | 2492 | 2763 | 3034 | 3305 | 3576 | 3847 | 4118 |
| TBRE1041 | 2222 | 2493 | 2764 | 3035 | 3306 | 3577 | 3848 | 4119 |
| TBRE1042 | 2223 | 2494 | 2765 | 3036 | 3307 | 3578 | 3849 | 4120 |
| TBRE1043 | 2224 | 2495 | 2766 | 3037 | 3308 | 3579 | 3850 | 4121 |
| TBRE1044 | 2225 | 2496 | 2767 | 3038 | 3309 | 3580 | 3851 | 4122 |
| TBRE1045 | 2226 | 2497 | 2768 | 3039 | 3310 | 3581 | 3852 | 4123 |
| TBRE1046 | 2227 | 2498 | 2769 | 3040 | 3311 | 3582 | 3853 | 4124 |
| TBRE1047 | 2228 | 2499 | 2770 | 3041 | 3312 | 3583 | 3854 | 4125 |
| TBRE1048 | 2229 | 2500 | 2771 | 3042 | 3313 | 3584 | 3855 | 4126 |
| TBRE1049 | 2230 | 2501 | 2772 | 3043 | 3314 | 3585 | 3856 | 4127 |
| TBRE1050 | 2231 | 2502 | 2773 | 3044 | 3315 | 3586 | 3857 | 4128 |
| TBRE1051 | 2232 | 2503 | 2774 | 3045 | 3316 | 3587 | 3858 | 4129 |
| TBRE1052 | 2233 | 2504 | 2775 | 3046 | 3317 | 3588 | 3859 | 4130 |
| TBRE1053 | 2234 | 2505 | 2776 | 3047 | 3318 | 3589 | 3860 | 4131 |
| TBRE1054 | 2235 | 2506 | 2777 | 3048 | 3319 | 3590 | 3861 | 4132 |
| TBRE1055 | 2236 | 2507 | 2778 | 3049 | 3320 | 3591 | 3862 | 4133 |
| TBRE1056 | 2237 | 2508 | 2779 | 3050 | 3321 | 3592 | 3863 | 4134 |
| TBRE1057 | 2238 | 2509 | 2780 | 3051 | 3322 | 3593 | 3864 | 4135 |
| TBRE1058 | 2239 | 2510 | 2781 | 3052 | 3323 | 3594 | 3865 | 4136 |
| TCER1001 | 2240 | 2511 | 2782 | 3053 | 3324 | 3595 | 3866 | 4137 |
| TCER1002 | 2241 | 2512 | 2783 | 3054 | 3325 | 3596 | 3867 | 4138 |
| TCER1003 | 2242 | 2513 | 2784 | 3055 | 3326 | 3597 | 3868 | 4139 |
| TCER1004 | 2243 | 2514 | 2785 | 3056 | 3327 | 3598 | 3869 | 4140 |
| TCER1005 | 2244 | 2515 | 2786 | 3057 | 3328 | 3599 | 3870 | 4141 |
| TCER1006 | 2245 | 2516 | 2787 | 3058 | 3329 | 3600 | 3871 | 4142 |
| TCER1007 | 2246 | 2517 | 2788 | 3059 | 3330 | 3601 | 3872 | 4143 |
| TCH01001 | 2247 | 2518 | 2789 | 3060 | 3331 | 3602 | 3873 | 4144 |
| TCOL1001 | 2248 | 2519 | 2790 | 3061 | 3332 | 3603 | 3874 | 4145 |
| TCOL1002 | 2249 | 2520 | 2791 | 3062 | 3333 | 3604 | 3875 | 4146 |
| TCOL1003 | 2250 | 2521 | 2792 | 3063 | 3334 | 3605 | 3876 | 4147 |
| TCOL1004 | 2251 | 2522 | 2793 | 3064 | 3335 | 3606 | 3877 | 4148 |
| TCOL1005 | 2252 | 2523 | 2794 | 3065 | 3336 | 3607 | 3878 | 4149 |
| TCOL1006 | 2253 | 2524 | 2795 | 3066 | 3337 | 3608 | 3879 | 4150 |
| TCOL1007 | 2254 | 2525 | 2796 | 3067 | 3338 | 3609 | 3880 | 4151 |
| TCOL1008 | 2255 | 2526 | 2797 | 3068 | 3339 | 3610 | 3881 | 4152 |
| TCOL1009 | 2256 | 2527 | 2798 | 3069 | 3340 | 3611 | 3882 | 4153 |
| TESO1001 | 2257 | 2528 | 2799 | 3070 | 3341 | 3612 | 3883 | 4154 |
| TESO1002 | 2258 | 2529 | 2800 | 3071 | 3342 | 3613 | 3884 | 4155 |
| TESO1003 | 2259 | 2530 | 2801 | 3072 | 3343 | 3614 | 3885 | 4156 |
| TESO1004 | 2260 | 2531 | 2802 | 3073 | 3344 | 3615 | 3886 | 4157 |
| TESO1005 | 2261 | 2532 | 2803 | 3074 | 3345 | 3616 | 3887 | 4158 |
| TESO1006 | 2262 | 2533 | 2804 | 3075 | 3346 | 3617 | 3888 | 4159 |
| TESO1007 | 2263 | 2534 | 2805 | 3076 | 3347 | 3618 | 3889 | 4160 |
| THNS1001 | 2264 | 2535 | 2806 | 3077 | 3348 | 3619 | 3890 | 4161 |
| THNS1002 | 2265 | 2536 | 2807 | 3078 | 3349 | 3620 | 3891 | 4162 |
| THNS1003 | 2266 | 2537 | 2808 | 3079 | 3350 | 3621 | 3892 | 4163 |
| THNS1004 | 2267 | 2538 | 2809 | 3080 | 3351 | 3622 | 3893 | 4164 |
| THNS1005 | 2268 | 2539 | 2810 | 3081 | 3352 | 3623 | 3894 | 4165 |
| THNS1006 | 2269 | 2540 | 2811 | 3082 | 3353 | 3624 | 3895 | 4166 |
| THNS1007 | 2270 | 2541 | 2812 | 3083 | 3354 | 3625 | 3896 | 4167 |
| THNS1008 | 2271 | 2542 | 2813 | 3084 | 3355 | 3626 | 3897 | 4168 |
| THNS1009 | 2272 | 2543 | 2814 | 3085 | 3356 | 3627 | 3898 | 4169 |
| THNS1010 | 2273 | 2544 | 2815 | 3086 | 3357 | 3628 | 3899 | 4170 |
| THNS1011 | 2274 | 2545 | 2816 | 3087 | 3358 | 3629 | 3900 | 4171 |
| THNS1012 | 2275 | 2546 | 2817 | 3088 | 3359 | 3630 | 3901 | 4172 |
| THNS1013 | 2276 | 2547 | 2818 | 3089 | 3360 | 3631 | 3902 | 4173 |
| THNS1014 | 2277 | 2548 | 2819 | 3090 | 3361 | 3632 | 3903 | 4174 |
| TKIC1001 | 2278 | 2549 | 2820 | 3091 | 3362 | 3633 | 3904 | 4175 |
| TKIC1002 | 2279 | 2550 | 2821 | 3092 | 3363 | 3634 | 3905 | 4176 |
| TKIC1003 | 2280 | 2551 | 2822 | 3093 | 3364 | 3635 | 3906 | 4177 |
| TKIC1004 | 2281 | 2552 | 2823 | 3094 | 3365 | 3636 | 3907 | 4178 |
| TKIC1005 | 2282 | 2553 | 2824 | 3095 | 3366 | 3637 | 3908 | 4179 |
| TKIC1006 | 2283 | 2554 | 2825 | 3096 | 3367 | 3638 | 3909 | 4180 |
| TKIC1007 | 2284 | 2555 | 2826 | 3097 | 3368 | 3639 | 3910 | 4181 |
| TKIC1008 | 2285 | 2556 | 2827 | 3098 | 3369 | 3640 | 3911 | 4182 |
| TKIC1009 | 2286 | 2557 | 2828 | 3099 | 3370 | 3641 | 3912 | 4183 |
| TKIC1010 | 2287 | 2558 | 2829 | 3100 | 3371 | 3642 | 3913 | 4184 |
| TKIC1011 | 2288 | 2559 | 2830 | 3101 | 3372 | 3643 | 3914 | 4185 |
| TKIC1012 | 2289 | 2560 | 2831 | 3102 | 3373 | 3644 | 3915 | 4186 |
| TKIC1013 | 2290 | 2561 | 2832 | 3103 | 3374 | 3645 | 3916 | 4187 |
| TKIC1014 | 2291 | 2562 | 2833 | 3104 | 3375 | 3646 | 3917 | 4188 |
| TKIC1015 | 2292 | 2563 | 2834 | 3105 | 3376 | 3647 | 3918 | 4189 |
| TKIC1016 | 2293 | 2564 | 2835 | 3106 | 3377 | 3648 | 3919 | 4190 |
| TKIC1017 | 2294 | 2565 | 2836 | 3107 | 3378 | 3649 | 3920 | 4191 |
| TKIC1018 | 2295 | 2566 | 2837 | 3108 | 3379 | 3650 | 3921 | 4192 |
| TKIC1019 | 2296 | 2567 | 2838 | 3109 | 3380 | 3651 | 3922 | 4193 |
| TKIC1020 | 2297 | 2568 | 2839 | 3110 | 3381 | 3652 | 3923 | 4194 |
| TKIP1001 | 2298 | 2569 | 2840 | 3111 | 3382 | 3653 | 3924 | 4195 |
| TKIP1002 | 2299 | 2570 | 2841 | 3112 | 3383 | 3654 | 3925 | 4196 |
| TKIP1003 | 2300 | 2571 | 2842 | 3113 | 3384 | 3655 | 3926 | 4197 |
| TKIP1004 | 2301 | 2572 | 2843 | 3114 | 3385 | 3656 | 3927 | 4198 |
| TKIP1005 | 2302 | 2573 | 2844 | 3115 | 3386 | 3657 | 3928 | 4199 |
| TKIP1006 | 2303 | 2574 | 2845 | 3116 | 3387 | 3658 | 3929 | 4200 |
| TLGG1001 | 2304 | 2575 | 2846 | 3117 | 3388 | 3659 | 3930 | 4201 |
| TLIV1001 | 2305 | 2576 | 2847 | 3118 | 3389 | 3660 | 3931 | 4202 |
| TLIV1002 | 2306 | 2577 | 2848 | 3119 | 3390 | 3661 | 3932 | 4203 |
| TLIV1003 | 2307 | 2578 | 2849 | 3120 | 3391 | 3662 | 3933 | 4204 |
| TLIV1004 | 2308 | 2579 | 2850 | 3121 | 3392 | 3663 | 3934 | 4205 |
| TLUA1001 | 2309 | 2580 | 2851 | 3122 | 3393 | 3664 | 3935 | 4206 |
| TLUA1002 | 2310 | 2581 | 2852 | 3123 | 3394 | 3665 | 3936 | 4207 |
| TLUA1003 | 2311 | 2582 | 2853 | 3124 | 3395 | 3666 | 3937 | 4208 |
| TLUA1004 | 2312 | 2583 | 2854 | 3125 | 3396 | 3667 | 3938 | 4209 |
| TLUA1005 | 2313 | 2584 | 2855 | 3126 | 3397 | 3668 | 3939 | 4210 |
| TLUA1006 | 2314 | 2585 | 2856 | 3127 | 3398 | 3669 | 3940 | 4211 |
| TLUA1007 | 2315 | 2586 | 2857 | 3128 | 3399 | 3670 | 3941 | 4212 |
| TLUA1008 | 2316 | 2587 | 2858 | 3129 | 3400 | 3671 | 3942 | 4213 |
| TLUA1009 | 2317 | 2588 | 2859 | 3130 | 3401 | 3672 | 3943 | 4214 |
| TLUA1010 | 2318 | 2589 | 2860 | 3131 | 3402 | 3673 | 3944 | 4215 |
| TLUA1011 | 2319 | 2590 | 2861 | 3132 | 3403 | 3674 | 3945 | 4216 |
| TLUA1012 | 2320 | 2591 | 2862 | 3133 | 3404 | 3675 | 3946 | 4217 |
| TLUA1013 | 2321 | 2592 | 2863 | 3134 | 3405 | 3676 | 3947 | 4218 |
| TLUA1014 | 2322 | 2593 | 2864 | 3135 | 3406 | 3677 | 3948 | 4219 |
| TLUA1015 | 2323 | 2594 | 2865 | 3136 | 3407 | 3678 | 3949 | 4220 |
| TLUA1016 | 2324 | 2595 | 2866 | 3137 | 3408 | 3679 | 3950 | 4221 |
| TLUA1017 | 2325 | 2596 | 2867 | 3138 | 3409 | 3680 | 3951 | 4222 |
| TLUA1018 | 2326 | 2597 | 2868 | 3139 | 3410 | 3681 | 3952 | 4223 |
| TLUS1001 | 2327 | 2598 | 2869 | 3140 | 3411 | 3682 | 3953 | 4224 |
| TLUS1002 | 2328 | 2599 | 2870 | 3141 | 3412 | 3683 | 3954 | 4225 |
| TLUS1003 | 2329 | 2600 | 2871 | 3142 | 3413 | 3684 | 3955 | 4226 |
| TLUS1004 | 2330 | 2601 | 2872 | 3143 | 3414 | 3685 | 3956 | 4227 |
| TLUS1005 | 2331 | 2602 | 2873 | 3144 | 3415 | 3686 | 3957 | 4228 |
| TLUS1006 | 2332 | 2603 | 2874 | 3145 | 3416 | 3687 | 3958 | 4229 |
| TLUS1007 | 2333 | 2604 | 2875 | 3146 | 3417 | 3688 | 3959 | 4230 |
| TLUS1008 | 2334 | 2605 | 2876 | 3147 | 3418 | 3689 | 3960 | 4231 |
| TLUS1009 | 2335 | 2606 | 2877 | 3148 | 3419 | 3690 | 3961 | 4232 |
| TLUS1010 | 2336 | 2607 | 2878 | 3149 | 3420 | 3691 | 3962 | 4233 |
| TLUS1011 | 2337 | 2608 | 2879 | 3150 | 3421 | 3692 | 3963 | 4234 |
| TMEL1015 | 2338 | 2609 | 2880 | 3151 | 3422 | 3693 | 3964 | 4235 |
| TMEL1016 | 2339 | 2610 | 2881 | 3152 | 3423 | 3694 | 3965 | 4236 |
| TMEL1017 | 2340 | 2611 | 2882 | 3153 | 3424 | 3695 | 3966 | 4237 |
| TMEL1018 | 2341 | 2612 | 2883 | 3154 | 3425 | 3696 | 3967 | 4238 |
| TMEL1019 | 2342 | 2613 | 2884 | 3155 | 3426 | 3697 | 3968 | 4239 |
| TMEL1020 | 2343 | 2614 | 2885 | 3156 | 3427 | 3698 | 3969 | 4240 |
| TMEL1021 | 2344 | 2615 | 2886 | 3157 | 3428 | 3699 | 3970 | 4241 |
| TMEL1022 | 2345 | 2616 | 2887 | 3158 | 3429 | 3700 | 3971 | 4242 |
| TMEL1023 | 2346 | 2617 | 2888 | 3159 | 3430 | 3701 | 3972 | 4243 |
| TMEL1024 | 2347 | 2618 | 2889 | 3160 | 3431 | 3702 | 3973 | 4244 |
| TMEL1025 | 2348 | 2619 | 2890 | 3161 | 3432 | 3703 | 3974 | 4245 |
| TMEL1026 | 2349 | 2620 | 2891 | 3162 | 3433 | 3704 | 3975 | 4246 |
| TMEL1027 | 2350 | 2621 | 2892 | 3163 | 3434 | 3705 | 3976 | 4247 |
| TMEL1028 | 2351 | 2622 | 2893 | 3164 | 3435 | 3706 | 3977 | 4248 |
| TMEL1029 | 2352 | 2623 | 2894 | 3165 | 3436 | 3707 | 3978 | 4249 |
| TMEL1030 | 2353 | 2624 | 2895 | 3166 | 3437 | 3708 | 3979 | 4250 |
| TMEL1031 | 2354 | 2625 | 2896 | 3167 | 3438 | 3709 | 3980 | 4251 |
| TMEL1032 | 2355 | 2626 | 2897 | 3168 | 3439 | 3710 | 3981 | 4252 |
| TMEL1033 | 2356 | 2627 | 2898 | 3169 | 3440 | 3711 | 3982 | 4253 |
| TMEL1034 | 2357 | 2628 | 2899 | 3170 | 3441 | 3712 | 3983 | 4254 |
| TMEL1035 | 2358 | 2629 | 2900 | 3171 | 3442 | 3713 | 3984 | 4255 |
| TMEL1036 | 2359 | 2630 | 2901 | 3172 | 3443 | 3714 | 3985 | 4256 |
| TMEL1037 | 2360 | 2631 | 2902 | 3173 | 3444 | 3715 | 3986 | 4257 |
| TMEL1038 | 2361 | 2632 | 2903 | 3174 | 3445 | 3716 | 3987 | 4258 |
| TMEL1039 | 2362 | 2633 | 2904 | 3175 | 3446 | 3717 | 3988 | 4259 |
| TMEL1040 | 2363 | 2634 | 2905 | 3176 | 3447 | 3718 | 3989 | 4260 |
| TMEL1041 | 2364 | 2635 | 2906 | 3177 | 3448 | 3719 | 3990 | 4261 |
| TMES1001 | 2365 | 2636 | 2907 | 3178 | 3449 | 3720 | 3991 | 4262 |
| TMES1002 | 2366 | 2637 | 2908 | 3179 | 3450 | 3721 | 3992 | 4263 |
| TMES1003 | 2367 | 2638 | 2909 | 3180 | 3451 | 3722 | 3993 | 4264 |
| TMES1004 | 2368 | 2639 | 2910 | 3181 | 3452 | 3723 | 3994 | 4265 |
| TOVA1001 | 2369 | 2640 | 2911 | 3182 | 3453 | 3724 | 3995 | 4266 |
| TOVA1002 | 2370 | 2641 | 2912 | 3183 | 3454 | 3725 | 3996 | 4267 |
| TOVA1003 | 2371 | 2642 | 2913 | 3184 | 3455 | 3726 | 3997 | 4268 |
| TOVA1004 | 2372 | 2643 | 2914 | 3185 | 3456 | 3727 | 3998 | 4269 |
| TOVA1005 | 2373 | 2644 | 2915 | 3186 | 3457 | 3728 | 3999 | 4270 |
| TOVA1006 | 2374 | 2645 | 2916 | 3187 | 3458 | 3729 | 4000 | 4271 |
| TOVA1007 | 2375 | 2646 | 2917 | 3188 | 3459 | 3730 | 4001 | 4272 |
| TOVA1008 | 2376 | 2647 | 2918 | 3189 | 3460 | 3731 | 4002 | 4273 |
| TPAN1001 | 2377 | 2648 | 2919 | 3190 | 3461 | 3732 | 4003 | 4274 |
| TPAN1002 | 2378 | 2649 | 2920 | 3191 | 3462 | 3733 | 4004 | 4275 |
| TPAN1003 | 2379 | 2650 | 2921 | 3192 | 3463 | 3734 | 4005 | 4276 |
| TPAN1004 | 2380 | 2651 | 2922 | 3193 | 3464 | 3735 | 4006 | 4277 |
| TPAN1005 | 2381 | 2652 | 2923 | 3194 | 3465 | 3736 | 4007 | 4278 |
| TPAN1006 | 2382 | 2653 | 2924 | 3195 | 3466 | 3737 | 4008 | 4279 |
| TPAN1007 | 2383 | 2654 | 2925 | 3196 | 3467 | 3738 | 4009 | 4280 |
| TPHE1001 | 2384 | 2655 | 2926 | 3197 | 3468 | 3739 | 4010 | 4281 |
| TPRO1001 | 2385 | 2656 | 2927 | 3198 | 3469 | 3740 | 4011 | 4282 |
| TPRO1002 | 2386 | 2657 | 2928 | 3199 | 3470 | 3741 | 4012 | 4283 |
| TPRO1003 | 2387 | 2658 | 2929 | 3200 | 3471 | 3742 | 4013 | 4284 |
| TREC1001 | 2388 | 2659 | 2930 | 3201 | 3472 | 3743 | 4014 | 4285 |
| TREC1002 | 2389 | 2660 | 2931 | 3202 | 3473 | 3744 | 4015 | 4286 |
| TREC1003 | 2390 | 2661 | 2932 | 3203 | 3474 | 3745 | 4016 | 4287 |
| TSAR1001 | 2391 | 2662 | 2933 | 3204 | 3475 | 3746 | 4017 | 4288 |
| TSAR1002 | 2392 | 2663 | 2934 | 3205 | 3476 | 3747 | 4018 | 4289 |
| TSAR1003 | 2393 | 2664 | 2935 | 3206 | 3477 | 3748 | 4019 | 4290 |
| TSAR1004 | 2394 | 2665 | 2936 | 3207 | 3478 | 3749 | 4020 | 4291 |
| TSAR1005 | 2395 | 2666 | 2937 | 3208 | 3479 | 3750 | 4021 | 4292 |
| TSAR1006 | 2396 | 2667 | 2938 | 3209 | 3480 | 3751 | 4022 | 4293 |
| TSAR1007 | 2397 | 2668 | 2939 | 3210 | 3481 | 3752 | 4023 | 4294 |
| TSAR1008 | 2398 | 2669 | 2940 | 3211 | 3482 | 3753 | 4024 | 4295 |
| TSTO1001 | 2399 | 2670 | 2941 | 3212 | 3483 | 3754 | 4025 | 4296 |
| TSTO1002 | 2400 | 2671 | 2942 | 3213 | 3484 | 3755 | 4026 | 4297 |
| TSTO1003 | 2401 | 2672 | 2943 | 3214 | 3485 | 3756 | 4027 | 4298 |
| TSTO1004 | 2402 | 2673 | 2944 | 3215 | 3486 | 3757 | 4028 | 4299 |
| TSTO1005 | 2403 | 2674 | 2945 | 3216 | 3487 | 3758 | 4029 | 4300 |
| TSTO1006 | 2404 | 2675 | 2946 | 3217 | 3488 | 3759 | 4030 | 4301 |
| TSTO1007 | 2405 | 2676 | 2947 | 3218 | 3489 | 3760 | 4031 | 4302 |
| TSTO1008 | 2406 | 2677 | 2948 | 3219 | 3490 | 3761 | 4032 | 4303 |
| TSTO1009 | 2407 | 2678 | 2949 | 3220 | 3491 | 3762 | 4033 | 4304 |
| TSTO1010 | 2408 | 2679 | 2950 | 3221 | 3492 | 3763 | 4034 | 4305 |
| TTES1001 | 2409 | 2680 | 2951 | 3222 | 3493 | 3764 | 4035 | 4306 |
| TTES1002 | 2410 | 2681 | 2952 | 3223 | 3494 | 3765 | 4036 | 4307 |
| TTES1003 | 2411 | 2682 | 2953 | 3224 | 3495 | 3766 | 4037 | 4308 |
| TTES1004 | 2412 | 2683 | 2954 | 3225 | 3496 | 3767 | 4038 | 4309 |
| TTES1005 | 2413 | 2684 | 2955 | 3226 | 3497 | 3768 | 4039 | 4310 |
| TTES1006 | 2414 | 2685 | 2956 | 3227 | 3498 | 3769 | 4040 | 4311 |
| TTES1007 | 2415 | 2686 | 2957 | 3228 | 3499 | 3770 | 4041 | 4312 |
| TTES1008 | 2416 | 2687 | 2958 | 3229 | 3500 | 3771 | 4042 | 4313 |
| TTES1009 | 2417 | 2688 | 2959 | 3230 | 3501 | 3772 | 4043 | 4314 |
| TTES1010 | 2418 | 2689 | 2960 | 3231 | 3502 | 3773 | 4044 | 4315 |
| TTES1011 | 2419 | 2690 | 2961 | 3232 | 3503 | 3774 | 4045 | 4316 |
| TTES1012 | 2420 | 2691 | 2962 | 3233 | 3504 | 3775 | 4046 | 4317 |
| TTHY1001 | 2421 | 2692 | 2963 | 3234 | 3505 | 3776 | 4047 | 4318 |
| TTHY1002 | 2422 | 2693 | 2964 | 3235 | 3506 | 3777 | 4048 | 4319 |
| TTHY1003 | 2423 | 2694 | 2965 | 3236 | 3507 | 3778 | 4049 | 4320 |
| TTHY1004 | 2424 | 2695 | 2966 | 3237 | 3508 | 3779 | 4050 | 4321 |
| TUCE1001 | 2425 | 2696 | 2967 | 3238 | 3509 | 3780 | 4051 | 4322 |
| TUCE1002 | 2426 | 2697 | 2968 | 3239 | 3510 | 3781 | 4052 | 4323 |
| TUCE1003 | 2427 | 2698 | 2969 | 3240 | 3511 | 3782 | 4053 | 4324 |
| TUCE1004 | 2428 | 2699 | 2970 | 3241 | 3512 | 3783 | 4054 | 4325 |
| TUCE1005 | 2429 | 2700 | 2971 | 3242 | 3513 | 3784 | 4055 | 4326 |
| TUCE1006 | 2430 | 2701 | 2972 | 3243 | 3514 | 3785 | 4056 | 4327 |
| TUCE1007 | 2431 | 2702 | 2973 | 3244 | 3515 | 3786 | 4057 | 4328 |
| TUCE1008 | 2432 | 2703 | 2974 | 3245 | 3516 | 3787 | 4058 | 4329 |
| TUCE1009 | 2433 | 2704 | 2975 | 3246 | 3517 | 3788 | 4059 | 4330 |
| TUCE1010 | 2434 | 2705 | 2976 | 3247 | 3518 | 3789 | 4060 | 4331 |
| TUCS1001 | 2435 | 2706 | 2977 | 3248 | 3519 | 3790 | 4061 | 4332 |
| TUCS1002 | 2436 | 2707 | 2978 | 3249 | 3520 | 3791 | 4062 | 4333 |
| TUCS1003 | 2437 | 2708 | 2979 | 3250 | 3521 | 3792 | 4063 | 4334 |
| TUVM1001 | 2438 | 2709 | 2980 | 3251 | 3522 | 3793 | 4064 | 4335 |
| TUVM1002 | 2439 | 2710 | 2981 | 3252 | 3523 | 3794 | 4065 | 4336 |

TABLE 3
lists Exemplary target antigen (cancer associated antigen) identified for the antibodies disclosed
herein. Binding specificity of an antibody to a target antigen is also listed

| | Antigen | | |
|---|---|---|---|
| Antibody | Abbreviated | | |
| Name | Name | Specificity | Antigen Full Name |
| TBLA1001 | RSPO1 | Medium | R-spondin 1, transcript variant 2 |
| TBLA1003 | ZDHHC1 | Medium | zinc finger DHHC-type containing 1, transcript |
| | | | variant 1 |
| TBLA1004 | RXRA | Very High | retinoid X receptor alpha, transcript variant 1 |
| TBLA1004 | RXRG | Very High | retinoid X receptor gamma, transcript variant 1 |
| TBLA1005 | TMEM154 | Medium | transmembrane protein 154 |
| TBLA1006 | SNAPIN | High | SNAP associated protein, transcript variant 1 |
| TBLA1007 | PYGL | Medium | glycogen phosphorylase L, transcript variant 1 |
| TBLA1007 | RCN3 | Medium | Reticulocalbin 3 |
| TBLA1007 | SYT12 | Medium | synaptotagmin 12, transcript variant X4 |
| TBLA1008 | Nr2f6 | Medium | Nuclear receptor subfamily 2 group f member 6 |
| TBLA1008 | PPP1R13L | Medium | protein phosphatase 1 regulatory subunit 13 like, |
| | | | transcript variant 2 |
| TBLA1010 | OR6Q1 | Medium | olfactory receptor family 6 subfamily Q member 1 |
| | | | (gene/pseudogene) |
| TBLA1011 | CTAG1A | Medium | cancer/testis antigen 1A |
| TBLA1012 | CTAG1A | Very High | cancer/testis antigen 1A |
| TBLA1013 | HTR1E | Medium | 5-hydroxytryptamine receptor 1E |
| TBRE1002 | MFAP3 | Medium | microfibril associated protein 3, transcript variant 3 |
| TBRE1004 | HABP4 | Very High | hyaluronan binding protein 4 |
| TBRE1006 | BC025996.2_frag | Medium | glucuronidase, beta pseudogene |
| TBRE1007 | DUSP12 | Medium | dual specificity phosphatase 12 |
| TBRE1007 | ACTN1 | Medium | actinin alpha 1, transcript variant 2 |
| TBRE1009 | ZKSCAN4 | Medium | zinc finger with KRAB and SCAN domains 4, |
| | | | transcript variant X1 |
| TBRE1011 | PNMA5 | High | PNMA family member 5, transcript variant 2 |
| TBRE1012 | KLHL40 | Very High | kelch like family member 40 |
| TBRE1012 | MPP2 | Very High | membrane palmitoylated protein 2, transcript |
| | | | variant 3 |
| TBRE1013 | BTN1A1 | High | butyrophilin subfamily 1 member A1 |
| TBRE1014 | PEX11G | High | peroxisomal biogenesis factor 11 gamma, transcript |
| | | | variant 1 |
| TBRE1017 | ZNF8 | Medium | zinc finger protein 8 |
| TBRE1017 | SATB2 | Medium | SATB homeobox 2, transcript variant 2 |
| TBRE1017 | GDAP1 | Medium | ganglioside induced differentiation associated |
| | | | protein 1, transcript variant 2 |
| TBRE1023 | CTNNAL1 | High | catenin alpha like 1, transcript variant 1 |
| TBRE1024 | FANCG | Medium | FA complementation group G |
| TBRE1027 | DDX18 | Medium | DEAD-box helicase 18 |
| TBRE1027 | STX1A | Medium | syntaxin 1A, transcript variant 1 |
| TBRE1027 | GMNN | Medium | geminin DNA replication inhibitor, transcript |
| | | | variant 1 |
| TBRE1030 | UBQLN1 | Medium | ubiquilin 1, transcript variant 2 |
| TBRE1030 | CNDP2 | Medium | carnosine dipeptidase 2, transcript variant 1 |
| TBRE1032 | XIAP | Medium | X-linked inhibitor of apoptosis, transcript variant 2 |
| TBRE1032 | HABP4 | Medium | hyaluronan binding protein 4 |
| TBRE1034 | SDCCAG3 | Medium | endosome associated trafficking regulator 1, |
| | | | transcript variant 2 |
| TBRE1034 | CHMP4B | Medium | charged multivesicular body protein 4B |
| TBRE1035 | GYG2 | Medium | glycogenin 2, transcript variant 2 |
| TBRE1036 | EGFEM1P | Medium | Egf like and emi domain containing 1, pseudogene |
| TBRE1038 | ACTN4 | Very High | actinin alpha 4, transcript variant 1 |
| TBRE1039 | PNMA5 | Medium | PNMA family member 5, transcript variant 2 |
| TBRE1039 | PLCD1 | Medium | phospholipase C delta 1, transcript variant 2 |
| TBRE1039 | ZNF326 | Medium | zinc finger protein 326, transcript variant 1 |
| TBRE1045 | LN608403.1_frag | Medium | — |
| TBRE1045 | JPX_frag | Medium | JPX transcript, XIST activator |
| TBRE1045 | OBP2A | Medium | odorant binding protein 2A, transcript variant alpha |
| TBRE1049 | MYT1L | High | myelin transcription factor 1 like, transcript variant 2 |
| TBRE1049 | HSPE1 | High | heat shock protein family E (Hsp10) member 1 |
| TBRE1052 | KEAP1 | Very High | kelch like ECH associated protein 1, transcript |
| | | | variant 1 |
| TCER1001 | NAP1L1 | Very High | nucleosome assembly protein 1 like 1, transcript |
| | | | variant 1 |
| TCER1002 | NDE1 | High | nudE neurodevelopment protein 1, transcript |
| | | | variant 1 |
| TCER1003 | TRUB1 | High | TruB pseudouridine synthase family member 1 |
| TCER1003 | IMPDH2 | High | inosine monophosphate dehydrogenase 2 |
| TCER1003 | PLSCR4 | High | phospholipid scramblase 4, transcript variant X4 |
| TCER1004 | IVNS1ABP | Very High | influenza virus NS1A binding protein |
| TCER1005 | DVL3 | Medium | dishevelled segment polarity protein 3 |
| TCER1005 | ZNF260 | Medium | Zinc finger protein 260 |
| TCER1006 | SNX33 | Medium | sorting nexin 33, transcript variant 1 |
| TCER1007 | HN1L | Very High | Jupiter microtubule associated homolog 2 |
| TCER1007 | THEM6 | Very High | thioesterase superfamily member 6, transcript |
| | | | variant 1 |
| TCH01001 | KHDRBS2 | High | KH RNA binding domain containing, signal |
| | | | transduction associated 2, transcript variant 2 |
| TCOL1001 | C1QL3 | Medium | complement C1q like 3 |
| TCOL1002 | PPP1R27 | Medium | protein phosphatase 1 regulatory subunit 27 |
| TCOL1003 | DNASE1L2 | Medium | deoxyribonuclease 1 like 2, transcript variant 1 |
| TCOL1004 | ESYT2_frag | Medium | extended synaptotagmin 2 |
| TCOL1005 | CCL18 | Medium | C-C motif chemokine ligand 18 |
| TCOL1006 | HOMEZ | Medium | homeobox and leucine zipper encoding |
| TCOL1006 | BAIAP2 | Medium | BAR/IMD domain containing adaptor protein 2, |
| | | | transcript variant 3 |
| TCOL1007 | KEAP1 | Very High | kelch like ECH associated protein 1, transcript |
| | | | variant 1 |
| TCOL1008 | RUFY3 | High | RUN and FYVE domain containing 3, transcript |
| | | | variant 2 |
| TCOL1009 | LHX5 | Medium | LIM homeobox 5 |
| TCOL1009 | GRB2 | Medium | growth factor receptor bound protein 2, transcript |
| | | | variant 1 |
| TESO1001 | TH | High | Tyrosine hydroxylase |
| TESO1003 | LRRC28 | Medium | leucine rich repeat containing 28, transcript variant 1 |
| TESO1005 | SPATA33 | Medium | spermatogenesis associated 33, transcript variant 2 |
| TESO1006 | ATP2C1 | Medium | Atpase secretory pathway ca2+ transporting 1 |
| TESO1006 | TSHZ2 | Medium | teashirt zinc finger homeobox 2, transcript variant 1 |
| THNS1002 | C4BPB | Medium | Complement component 4 binding protein beta |
| THNS1003 | NCCRP1 | Very High | NCCRP1, F-box associated domain containing |
| THNS1003 | CCDC102A | Very High | coiled-coil domain containing 102A, transcript |
| | | | variant X1 |
| THNS1004 | RBM47 | High | RNA binding motif protein 47, transcript variant |
| | | | X10 |
| THNS1006 | RAD1 | Medium | RAD1 checkpoint DNA exonuclease, transcript |
| | | | variant 1 |
| THNS1006 | MTUS1 | Medium | Microtubule associated scaffold protein 1 |
| THINS1008 | KEAP1 | Very High | kelch like ECH associated protein 1, transcript |
| | | | variant 1 |
| THNS1009 | PNMA5 | Very High | PNMA family member 5, transcript variant 2 |
| THNS1013 | GPR83 | Medium | G protein-coupled receptor 83, transcript variant 1 |
| THNS1014 | CDS1 | Medium | CDP-diacylglycerol synthase 1 |
| THNS1014 | DNAAF3 | Medium | dynein axonemal assembly factor 3, transcript |
| | | | variant 3 |
| TKIC1001 | CPNE1 | Medium | copine 1, transcript variant 2 |
| TKIC1002 | ADCK5 | Medium | aarF domain containing kinase 5 |
| TKIC1004 | CRYAB | Medium | crystallin alpha B, transcript variant 2 |
| TKIC1005 | HCLS1 | Very High | hematopoietic cell-specific Lyn substrate 1, |
| | | | transcript variant 1 |
| TKIC1006 | AKR1B1 | Very High | aldo-keto reductase family 1 member B, transcript |
| | | | variant 1 |
| TKIC1007 | SURF6 | Medium | surfeit 6, transcript variant 1 |
| TKIC1007 | PCNA | Medium | proliferating cell nuclear antigen, transcript variant 1 |
| TKIC1012 | S100B | High | S100 calcium binding protein B |
| TKIC1013 | CHEK2 | Medium | checkpoint kinase 2, transcript variant 3 |
| TKIC1019 | ANKRD53 | Medium | ankyrin repeat domain 53, transcript variant 2 |
| TLUA1001 | KLRG2 | Medium | Killer cell lectin like receptor g2 |
| TLUA1001 | TRIM35 | Medium | tripartite motif containing 35, transcript variant 1 |
| TLUA1001 | FXR2 | Medium | FMR1 autosomal homolog 2 |
| TLUA1004 | ANXA1 | Very High | annexin Al |
| TLUA1008 | ZNF287 | Medium | zinc finger protein 287, transcript variant 2 |
| TLUA1016 | FAM177A1 | Medium | family with sequence similarity 177 member A1, |
| | | | transcript variant 2 |
| TLUS1001 | QDPR | Medium | quinoid dihydropteridine reductase, transcript |
| | | | variant 1 |
| TLUS1003 | BC031259.1_frag | Medium | ELK2, member of ETS oncogene family, |
| | | | pseudogene 1 |
| TLUS1003 | METTL21C | Medium | methyltransferase like 21C |
| TLUS1006 | HMBS | High | hydroxymethylbilane synthase, transcript variant |
| | | | X3 |
| TLUS1006 | HOOK2 | High | hook microtubule tethering protein 2, transcript |
| | | | variant 2 |
| TMEL1016 | Q6ir13_frag | Very High | Magel2 |
| TMEL1016 | SRSF3 | Very High | serine and arginine rich splicing factor 3, transcript |
| | | | variant 1 |
| TMEL1017 | RANBP10 | Medium | RAN binding protein 10, transcript variant 1 |
| TMEL1017 | WNT9B | Medium | Wnt family member 9b |
| TMEL1018 | UBQLN2 | Very High | ubiquilin 2 |
| TMEL1018 | UBQLN1 | Very High | ubiquilin 1, transcript variant 2 |
| TMEL1018 | UBQLN3 | Very High | Ubiquilin 3 |
| TMEL1020 | AGR3 | Very High | anterior gradient 3, protein disulphide isomerase |
| | | | family member |
| TMEL1022 | SRSF3 | Medium | serine and arginine rich splicing factor 3, transcript |
| | | | variant 1 |
| TMEL1023 | BIRC7 | Very High | baculoviral IAP repeat containing 7, transcript |
| | | | variant 1 |
| TMEL1025 | SDCCAG3 | High | endosome associated trafficking regulator 1, |
| | | | transcript variant 2 |
| TMEL1027 | MTUS2 | High | microtubule associated scaffold protein 2, |
| | | | transcript variant 2 |
| TMEL1028 | ZNF296 | Medium | zinc finger protein 296 |
| TMEL1028 | PDE5A | Medium | phosphodiesterase 5A, transcript variant 1 |
| TMEL1028 | EP400NL | Medium | Ep400 pseudogene 1 |
| TMEL1030 | BCL2L1 | Medium | Bcl2 like 1 |
| TMEL1031 | ARGLU1 | Medium | arginine and glutamate rich 1 |
| TMEL1031 | SASS6 | Medium | SAS-6 centriolar assembly protein, transcript |
| | | | variant 2 |
| TMEL1032 | PSMD4 | Medium | proteasome 26S subunit, non-ATPase 4, transcript |
| | | | variant 2 |
| TMEL1032 | SLA | Medium | Src like adaptor, transcript variant 1 |
| TMEL1033 | NUDT21 | Medium | nudix hydrolase 21 |
| TMEL1033 | ZNF431 | Medium | zinc finger protein 431, transcript variant 2 |
| TMEL1033 | ZNF699 | Medium | Zinc finger protein 699 |
| TMEL1034 | QDPR | Medium | quinoid dihydropteridine reductase, transcript |
| | | | variant 1 |
| TMEL1035 | PAGE2 | Medium | PAGE family member 2 |
| TMEL1035 | KRTAP12-3 | Medium | keratin associated protein 12-3 |
| TMEL1037 | ENO2 | Medium | enolase 2 |
| TMEL1037 | C11orf68 | Medium | chromosome 11 open reading frame 68, transcript |
| | | | variant 1 |
| TMEL1038 | MARS | Medium | methionyl-tRNA synthetase 1 |
| TMEL1040 | SERPINB6 | High | serpin family B member 6, transcript variant 2 |
| TMEL1041 | ERP27 | Very High | endoplasmic reticulum protein 27, transcript |
| | | | variant 1 |
| TMEL1041 | DPY30 | Very High | Dpy-30 histone methyltransferase complex |
| | | | regulatory subunit |
| TMEL1041 | ROPN1L | Very High | rhophilin associated tail protein 1 like, transcript |
| | | | variant 2 |
| TMES1001 | SDCCAG3 | Medium | endosome associated trafficking regulator 1, |
| | | | transcript variant 2 |
| TMES1002 | HN1L | High | Jupiter microtubule associated homolog 2 |
| TMES1002 | BTBD8 | High | BTB domain containing 8 |
| TMES1003 | NCF4 | Medium | neutrophil cytosolic factor 4, transcript variant 2 |
| TMES1003 | TCP11L2 | Medium | t-complex 11 like 2, transcript variant X2 |
| TMES1003 | PLCB2 | Medium | phospholipase C beta 2, transcript variant 4 |
| TMES1004 | MAPRE2 | High | microtubule associated protein RP/EB family |
| | | | member 2, transcript variant 1 |
| TOVA1001 | DDX53 | Very High | DEAD-box helicase 53 |
| TOVA1002 | IL27RA | Medium | interleukin 27 receptor subunit alpha |
| TOVA1003 | DHPS | High | Deoxyhypusine synthase |
| TOVA1004 | HEATR3 | High | HEAT repeat containing 3, transcript variant 1 |
| TOVA1005 | DDX53 | High | DEAD-box helicase 53 |
| TOVA1005 | VEZT | High | Vezatin, adherens junctions transmembrane protein |
| TOVA1005 | WDR3 | High | Wd repeat domain 3 |
| TOVA1006 | DDX58 | Very High | DExD/H-box helicase 58 |
| TOVA1006 | DDX58 | Very High | DExD/H-box helicase 58 |
| TOVA1007 | NUDT22 | High | nudix hydrolase 22, transcript variant 2 |
| TOVA1008 | HN1L | Very High | Jupiter microtubule associated homolog 2 |
| TPAN1001 | GCA | Medium | grancalcin, transcript variant 4 |
| TPAN1002 | ERP27 | High | endoplasmic reticulum protein 27, transcript |
| | | | variant 1 |
| TPAN1003 | POLR3G | Medium | Rna polymerase iii subunit g |
| TPAN1004 | SNX1 | Medium | sorting nexin 1, transcript variant 1 |
| TPAN1005 | AB937783.1_frag | Medium | SAA2-SAA3 |
| TPAN1005 | PSMD3 | Medium | proteasome 26S subunit, non-ATPase 3 |
| TPAN1006 | CRKL | Medium | CRK like proto-oncogene, adaptor protein, |
| | | | transcript variant 1 |
| TPAN1007 | FBXO2 | Medium | F-box protein 2 |
| TPAN1007 | TUBG1 | Medium | tubulin gamma 1 |
| TPRO1001 | OXR1 | High | oxidation resistance 1, transcript variant 1 |
| TPRO1002 | ANKRD20A5P | Medium | Ankyrin repeat domain 20 family member a5, |
| | | | pseudogene |
| TPRO1002 | KIRREL | Medium | Kirre like nephrin family adhesion molecule 1 |
| TPRO1002 | GIGYF1 | Medium | GRB10 interacting GYF protein 1, transcript |
| | | | variant X10 |
| TPRO1003 | DEFA3 | Medium | defensin alpha 3 |
| TREC1001 | RSPH14 | Medium | radial spoke head 14 homolog |
| TREC1002 | CCL2 | Medium | C-C motif chemokine ligand 2 |
| TREC1003 | KLRC1 | Medium | killer cell lectin like receptor C1, transcript variant 3 |
| TREC1003 | KLHL12 | Medium | kelch like family member 12, transcript variant 2 |
| TSAR1001 | NRL | Medium | neural retina leucine zipper, transcript variant X4 |
| TSAR1002 | PLCD4 | Medium | phospholipase C delta 4 |
| TSAR1003 | CCDC74B | Medium | coiled-coil domain containing 74B, transcript |
| | | | variant 2 |
| TSAR1004 | DDX53 | High | DEAD-box helicase 53 |
| TSAR1005 | HSPBP1 | Very High | HSPA (Hsp70) binding protein 1, transcript variant 2 |
| TSAR1005 | HSPA2 | Very High | heat shock protein family A (Hsp70) member 2 |
| TSAR1005 | BAG2 | Very High | BCL2 associated athanogene 2 |
| TSAR1006 | CXCR4 | Medium | C-X-C motif chemokine receptor 4, transcript |
| | | | variant 2 |
| TSAR1006 | LINC00242 | Medium | Long intergenic non-protein coding rna 242 |
| TSAR1007 | STAT5A | Medium | signal transducer and activator of transcription 5A, |
| | | | transcript variant 2 |
| TSAR1007 | QDPR | Medium | quinoid dihydropteridine reductase, transcript |
| | | | variant 1 |
| TSTO1001 | CIB1 | Medium | calcium and integrin binding 1, transcript variant b |
| TSTO1001 | TSNARE1 | Medium | t-SNARE domain containing 1, transcript variant 1 |
| TSTO1002 | HAUS1 | Very High | HAUS augmin like complex subunit 1, transcript |
| | | | variant 1 |
| TSTO1002 | DYDC1 | Very High | DPY30 domain containing 1, transcript variant X4 |
| TSTO1003 | TGFB3 | Medium | Transforming growth factor beta 3 |
| TSTO1004 | CTRB2 | Medium | chymotrypsinogen B2 |
| TSTO1005 | NFKBIB | Very High | NFKB inhibitor beta, transcript variant 1 |
| TSTO1005 | CDK2AP2 | Very High | cyclin dependent kinase 2 associated protein 2, |
| | | | transcript variant 1 |
| TSTO1006 | LIPN | Medium | lipase family member N, transcript variant X1 |
| TSTO1007 | RGS14 | High | regulator of G protein signaling 14, transcript |
| | | | variant 1 |
| TSTO1007 | LRRC14 | High | leucine rich repeat containing 14, transcript variant 1 |
| TSTO1008 | TGFBI | Medium | transforming growth factor beta induced |
| TSTO1010 | BCL2 | High | BCL2 apoptosis regulator, transcript variant alpha |
| TTES1001 | DIXDC1 | Medium | DIX domain containing 1, transcript variant 2 |
| TTES1002 | CASP8 | Medium | Caspase 8 |
| TTES1002 | PGM2L1 | Medium | phosphoglucomutase 2 like 1 |
| TTES1003 | PDCD1 | Very High | programmed cell death 1 |
| TTES1004 | GRHPR | High | glyoxylate and hydroxypyruvate reductase |
| TTES1005 | CYB5R2 | Medium | Cytochrome b5 reductase 2 |
| TTES1006 | ACBD6 | Very High | acyl-CoA binding domain containing 6 |
| TTES1007 | PDCL | Medium | phosducin like |
| TTES1008 | DDX52 | Medium | Dexd-box helicase 52 |
| TTES1008 | GPR4 | Medium | G protein-coupled receptor 4 |
| TTES1009 | ADCK5 | Medium | aarF domain containing kinase 5 |
| TTES1010 | DIXDC1 | Medium | DIX domain containing 1, transcript variant 2 |
| TTES1011 | HN1L | High | Jupiter microtubule associated homolog 2 |
| TTES1012 | GAGE2A | Medium | G antigen 2A |
| TTHY1001 | DIXDC1 | Medium | DIX domain containing 1, transcript variant 2 |
| TTHY1001 | POLR2E | Medium | RNA polymerase II subunit E, transcript variant 1 |
| TTHY1002 | PCNA | Medium | proliferating cell nuclear antigen, transcript variant 1 |
| TTHY1003 | BCL7C | Medium | BAF chromatin remodeling complex subunit |
| | | | BCL7C, transcript variant 2 |
| TTHY1003 | IVNS1ABP | Medium | influenza virus NS1A binding protein |
| TTHY1004 | CTAG1A | Medium | cancer/testis antigen 1A |
| TUCE1004 | CTAG1A | Very High | cancer/testis antigen 1A |
| TUCE1005 | UTP6 | Medium | UTP6 small subunit processome component |
| TUCS1003 | CTAG1A | Very High | cancer/testis antigen 1A |
| TUVM1001 | RP2 | Medium | RP2 activator of ARL3 GTPase |

TABLE 4
lists SEQ ID NOs of exemplary amino acid
sequences of target antigens for the antibodies of the
disclosure and antigen binding fragment thereof

| | SEQ | |
|---|---|---|
| | ID | NCBI |
| Antigen Name | NO: | Accession NO: |
| RSPO1 | 4337 | NP_001229837 |
| ZDHHC1 | 4338 | NP_037436 |
| RXRA | 4339 | NP_002948 |
| RXRG | 4340 | NP_008848 |
| TMEM154 | 4341 | NP_689893 |
| SNAPIN | 4342 | NP_036569 |
| PYGL | 4343 | NP_002854 |
| RCN3 | 4344 | NP_065701 |
| SYT12 | 4345 | XP_011543649 |
| Nr2f6 | 4346 | NP_005225 |
| PPP1R13L | 4347 | NP_006654 |
| OR6Q1 | 4348 | NP_001005186 |
| CTAG1A | 4349 | NP_640343 |
| HTR1E | 4350 | NP_000856 |
| MFAP3 | 4351 | NP_001229265 |
| HABP4 | 4352 | NP_055097 |
| BC025996.2_frag | 4353 | NR_003675 |
| DUSP12 | 4354 | NP_009171 |
| ACTN1 | 4355 | NP_001093 |
| ZKSCAN4 | 4356 | XP_005249152 |
| PNMA5 | 4357 | NP_001096620 |
| KLHL40 | 4358 | NP_689606 |
| MPP2 | 4359 | NP_005365 |
| BTN1A1 | 4360 | NP_001723 |
| PEX11G | 4361 | NP_542393 |
| ZNF8 | 4362 | NP_066575 |
| SATB2 | 4363 | NP_056080 |
| GDAP1 | 4364 | NP_001035808 |
| CTNNAL1 | 4365 | NP_003789 |
| FANCG | 4366 | NP_004620 |
| DDX18 | 4367 | NP_006764 |
| STX1A | 4368 | NP_004594 |
| GMNN | 4369 | NP_056979 |
| UBQLN1 | 4370 | NP_444295 |
| CNDP2 | 4371 | NP_060705 |
| XIAP | 4372 | NP_001191330 |
| SDCCAG3 | 4373 | NP_006634 |
| CHMP4B | 4374 | NP_789782 |
| GYG2 | 4375 | NP_003909 |
| EGFEM1P | 4376 | NR_021485 |
| ACTN4 | 4377 | NP_004915 |
| PLCD1 | 4378 | NP_006216 |
| ZNF326 | 4379 | NP_892021 |
| LN608403.1_frag | 4380 | — |
| JPX_frag | 4381 | — |
| OBP2A | 4382 | NP_055397 |
| MYT1L | 4383 | NP_055840 |
| HSPE1 | 4384 | NP_002148 |
| KEAP1 | 4385 | NP_987096 |
| NAP1L1 | 4386 | NP_631946 |
| NDE1 | 4387 | NP_001137451 |
| TRUB1 | 4388 | NP_631908 |
| IMPDH2 | 4389 | NP_000875 |
| PLSCR4 | 4390 | XP_011511333 |
| IVNS1ABP | 4391 | NP_006460 |
| DVL3 | 4392 | NP_004414 |
| ZNF260 | 4393 | NP_001012774 |
| SNX33 | 4394 | NP_695003 |
| HN1L | 4395 | NP_653171 |
| THEM6 | 4396 | NP_057731 |
| KHDRBS2 | 4397 | NP_689901 |
| C1QL3 | 4398 | NP_001010908 |
| PPP1R27 | 4399 | NP_001007534 |
| DNASE1L2 | 4400 | NP_001365 |
| ESYT2_frag | 4401 | NP_001354702 |
| CCL18 | 4402 | NP_002979 |
| HOMEZ | 4403 | NP_065885 |
| BAIAP2 | 4404 | NP_006331 |
| RUFY3 | 4405 | NP_055776 |
| LHX5 | 4406 | NP_071758 |
| GRB2 | 4407 | NP_002077 |
| TH | 4408 | NP_000351 |
| LRRC28 | 4409 | NP_653199 |
| SPATA33 | 4410 | NP_694570 |
| ATP2C1 | 4411 | NP_001001485 |
| TSHZ2 | 4412 | NP_775756 |
| C4BPB | 4413 | NP_000707 |
| NCCRP1 | 4414 | NP_001001414 |
| CCDC102A | 4415 | XP_011521771 |
| RBM47 | 4416 | XP_005248166 |
| RAD1 | 4417 | NP_002844 |
| MTUS1 | 4418 | NP_001001924 |
| GPR83 | 4419 | NP_057624 |
| CDS1 | 4420 | NP_001254 |
| DNAAF3 | 4421 | NP_001243644 |
| CPNE1 | 4422 | NP_690903 |
| ADCK5 | 4423 | NP_777582 |
| CRYAB | 4424 | NP_001276736 |
| HCLS1 | 4425 | NP_005326 |
| AKR1B1 | 4426 | NP_001619 |
| SURF6 | 4427 | NP_006744 |
| PCNA | 4428 | NP_002583 |
| S100B | 4429 | NP_006263 |
| CHEK2 | 4430 | NP_001005735 |
| ANKRD53 | 4431 | NP_079209 |
| KLRG2 | 4432 | NP_940910 |
| TRIM35 | 4433 | NP_741983 |
| FXR2 | 4434 | NP_004851 |
| ANXA1 | 4435 | NP_000691 |
| ZNF287 | 4436 | NP_065704 |
| FAM177A1 | 4437 | NP_001072987 |
| QDPR | 4438 | NP_000311 |
| BC031259.1_frag | 4439 | — |
| METTL21C | 4440 | NP_001010977 |
| HMBS | 4441 | XP_005271589 |
| HOOK2 | 4442 | NP_001093646 |
| Q6ir13_frag | 4443 | — |
| SRSF3 | 4444 | NP_003008 |
| RANBP10 | 4445 | NP_065901 |
| WNT9B | 4446 | NM_001320458 |
| UBQLN2 | 4447 | NP_038472 |
| UBQLN3 | 4448 | NP_001334025 |
| AGR3 | 4449 | NP_789783 |
| BIRC7 | 4450 | NP_647478 |
| MTUS2 | 4451 | NP_056048 |
| ZNF296 | 4452 | NP_660331 |
| PDE5A | 4453 | NP_001074 |
| EP400NL | 4454 | NR_003290 |
| BCL2L1 | 4455 | NP_001182 |
| ARGLU1 | 4456 | NP_060481 |
| SASS6 | 4457 | NP_001291758 |
| PSMD4 | 4458 | NP_002801 |
| SLA | 4459 | NP_001039021 |
| NUDT21 | 4460 | NP_008937 |
| ZNF431 | 4461 | NP_597730 |
| ZNF699 | 4462 | NP_940937 |
| PAGE2 | 4463 | NP_997222 |
| KRTAP12-3 | 4464 | NP_941970 |
| ENO2 | 4465 | NP_001966 |
| C11orf68 | 4466 | NP_001129107 |
| MARS | 4467 | NP_004981 |
| SERPINB6 | 4468 | NP_001182220 |
| ERP27 | 4469 | NP_689534 |
| DPY30 | 4470 | NP_001308138 |
| ROPN1L | 4471 | NP_001188395 |
| BTBD8 | 4472 | NP_899065 |
| NCF4 | 4473 | NP_038202 |
| TCP11L2 | 4474 | XP_005268824 |
| PLCB2 | 4475 | NP_001271228 |
| MAPRE2 | 4476 | NP_055083 |
| DDX53 | 4477 | NP_874358 |
| IL27RA | 4478 | NP_004834 |
| DHPS | 4479 | NP_001193903 |
| HEATR3 | 4480 | NP_891552 |
| VEZT | 4481 | NP_001339017 |
| WDR3 | 4482 | NP_006775 |
| DDX58 | 4483 | NP_055129 |
| NUDT22 | 4484 | NP_001122084 |
| GCA | 4485 | NP_036330 |
| POLR3G | 4486 | NP_001357280 |
| SNX1 | 4487 | NP_003090 |
| AB937783.1_frag | 4488 | NP_001120852 |
| PSMD3 | 4489 | NP_002800 |
| CRKL | 4490 | NP_005198 |
| FBXO2 | 4491 | NP_036300 |
| TUBG1 | 4492 | NP_001061 |
| OXR1 | 4493 | NP_060472 |
| ANKRD20A5P | 4494 | NR_040113 |
| KIRREL | 4495 | NP_001164456 |
| GIGYF1 | 4496 | XP_005250589 |
| DEFA3 | 4497 | NP_005208 |
| RSPH14 | 4498 | NP_055248 |
| CCL2 | 4499 | NP_002973 |
| KLRC1 | 4500 | NP_998823 |
| KLHL12 | 4501 | NP_067646 |
| NRL | 4502 | XP_011535104 |
| PLCD4 | 4503 | NP_116115 |
| CCDC74B | 4504 | NP_001245236 |
| HSPBP1 | 4505 | NP_001123578 |
| HSPA2 | 4506 | NP_068814 |
| BAG2 | 4507 | NP_004273 |
| CXCR4 | 4508 | NP_003458 |
| LINC00242 | 4509 | NR_026781 |
| STAT5A | 4510 | NP_003143 |
| CIB1 | 4511 | NP_006375 |
| TSNARE1 | 4512 | NP_659440 |
| HAUS1 | 4513 | NP_612452 |
| DYDC1 | 4514 | XP_011537637 |
| TGFB3 | 4515 | NP_003230. |
| CTRB2 | 4516 | NP_001020371 |
| NFKBIB | 4517 | NP_002494 |
| CDK2AP2 | 4518 | NP_005842 |
| LIPN | 4519 | XP_011538385 |
| RGS14 | 4520 | NP_006471 |
| LRRC14 | 4521 | NP_001258965 |
| TGFBI | 4522 | NP_000349 |
| BCL2 | 4523 | NP_000624 |
| DIXDC1 | 4524 | NP_219493 |
| CASP8 | 4525 | NP_001073593 |
| PGM2L1 | 4526 | NP_775853 |
| PDCD1 | 4527 | NP_005009 |
| GRHPR | 4528 | NP_036335 |
| CYB5R2 | 4529 | NP_057313 |
| ACBD6 | 4530 | NP_115736 |
| PDCL | 4531 | NP_005379 |
| DDX52 | 4532 | NP_001278405 |
| GPR4 | 4533 | NP_005273 |
| GAGE2A | 4534 | NP_001120684 |
| POLR2E | 4535 | NP_002686 |
| BCL7C | 4536 | NP_004756 |
| UTP6 | 4537 | NP_060898 |
| RP2 | 4538 | NP_008846 |

What is claimed is:

1. An antibody or antigen-binding fragment thereof that comprises at least one of a variable heavy chain complementarity-determining region 1 (CDR-H1), a CDR-H2 and a CDR-H3, wherein:
(a) the CDR-H1 comprises a reconstructed polypeptide consensus sequence selected from any one of SEQ ID NOs: 543-813,
(b) the CDR-H2 comprises a reconstructed polypeptide consensus sequence selected from any one of SEQ ID NOs: 1085-1355, and
(c) the CDR-H3 comprises a reconstructed polypeptide consensus sequence selected from any one of SEQ ID NOs: 1627-1897.

2. An antibody or antigen-binding fragment thereof that comprises at least one of a variable light chain complementarity-determining region 1 (CDR-L1), a CDR-L2 and a CDR-L3, wherein:
(a) the CDR-L1 comprises a reconstructed polypeptide consensus sequence selected from any one of SEQ ID NOs: 814-1084,
(b) the CDR-L2 comprises a reconstructed polypeptide consensus sequence selected from any one of SEQ ID NOs: 1356-1626, and
(c) the CDR-L3 comprises a reconstructed polypeptide consensus sequence selected from any one of SEQ ID NOs: 1898-2168.

3. An antibody or antigen-binding fragment thereof that comprises:
(a) a variable heavy chain complementarity-determining region 1 (CDR-H1), a CDR-H2 and a CDR-H3, wherein:
(i) the CDR-H1 comprises a reconstructed polypeptide consensus sequence selected from any one of SEQ ID NOs: 543-813,
(ii) the CDR-H2 comprises a reconstructed polypeptide consensus sequence selected from any one of SEQ ID NOs: 1085-1355, and
(iii) the CDR-H3 comprises a reconstructed polypeptide consensus sequence selected from any one of SEQ ID NOs: 1627-1897; and
(b) a variable light chain complementarity-determining region 1 (CDR-L1), a CDR-L2, and a CDR-L3, wherein:
(i) the CDR-L1 comprises a reconstructed polypeptide consensus sequence selected from any one of SEQ ID NOs: 814-1084,
(ii) the CDR-L2 comprises a reconstructed polypeptide consensus sequence selected from any one of SEQ ID NOs: 1356-1626, and
(iii) the CDR-L3 comprises a reconstructed polypeptide consensus sequence selected from any one of SEQ ID NOs: 1898-2168.

4. The antibody or antigen-binding fragment thereof of any one of claims 1-3, wherein the antibody comprises an IgG, IgA, or IgM antibody.

5. The antibody or antigen-binding fragment thereof of claim 4, wherein the IgG comprises IgG1, IgG2, IgG3, IgG4, IgGA1, or IgGA2.

6. The antibody or antigen-binding fragment thereof of any of claims 1-5, wherein the antibody comprises a chimeric antibody, a humanized antibody, a human antibody, a monoclonal antibody, a deimmunized antibody, a bispecific antibody, a multispecific antibody, a multivalent antibody, or a combination thereof.

7. The antibody or antigen-binding fragment thereof of any one of claims 1-6, wherein the antigen-binding fragment comprises a Fab, Fab′, Fab′-SH, Fv, scFv, F(ab′)2, a diabody, a linear antibody, a single domain antibodies (sdAb), a camelid VHH domain, or a multi-specific antibody formed from antibody fragments.

8. The antibody or antigen-binding fragment thereof of any one of claims 1-7, wherein the antibody or antigen-binding fragment thereof is recombinant or synthetic.

9. The antibody or antigen-binding fragment thereof of any one of claims 1-8, wherein the antibody or antigen-binding fragment thereof further comprises an enzyme, a substrate, cofactor, a fluorescent marker, a chemiluminescent marker, a peptide tag, a magnetic particle, a drug, a toxin, or a combination thereof.

10. The antibody or antigen-binding fragment thereof of any one of claims 1-9, wherein the antibody or antigen-binding fragment thereof is cytolytic to a tumor cell or a cancer cell.

11. The antibody or antigen-binding fragment thereof of any one of claims 1-10, wherein the antibody or antigen-binding fragment thereof inhibits tumor growth or cancer cell growth.

12. The antibody or antigen-binding fragment thereof of claim 10 or claim 11, that is useful for treating a bladder cancer, wherein the bladder cancer is bladder urothelial carcinoma, squamous cell carcinoma of the bladder, adenocarcinoma of the bladder, or small cell carcinoma of the bladder.

13. The antibody or antigen-binding fragment thereof of claim 10 or claim 11, that is useful for treating a brain cancer, wherein the brain cancer is glioma, meningioma pituitary adenoma, vestibular schwannoma, nerve sheath tumor, primitive neuroectodermal tumor (medulloblastoma), ependymomas, astrocytomas, oligodendrogliomas, brainstem glioma, optic nerve glioma, mixed glioma (e.g., oligoastrocytoma), high-grade glioma, or low-grade glioma.

14. The antibody or antigen-binding fragment thereof of claim 10 or claim 11, that is useful for treating a breast cancer or breast carcinoma, wherein the breast cancer or breast carcinoma is invasive ductal carcinoma, ductal carcinoma in situ, invasive lobular carcinoma, lobular carcinoma in situ, inflammatory breast cancer, male breast cancer, phyllodes tumors of the breast, Paget's disease of the nipple, Angiosarcomas, or metastatic breast cancer.

15. The antibody or antigen-binding fragment thereof of claim 10 or claim 11, that is useful for treating a cervical cancer, wherein the cervical cancer is cervical squamous cell carcinoma, adenocarcinoma, adenosquamous carcinoma, small cell carcinoma, neuroendocrine tumor, glassy cell carcinoma, villoglandular adenocarcinoma, endocervical (NOS) type adenocarcinoma, mucinous adenocarcinoma, minimal deviation adenocarcinoma (mucinous and endometrioid types), enteric/GI type adenocarcinoma, endometrioid type adenocarcinoma, clear cell adenocarcinoma, serous adenocarcinoma, mesonephric adenocarcinoma, adenoid basal carcinoma, or adenoid cystic carcinoma.

16. The antibody or antigen-binding fragment thereof of claim 10 or claim 11, that is useful for treating a cholangiocarcinoma, wherein the cholangiocarcinoma is intrahepatic cholangiocarcinoma, hilar cholangiocarcinoma, or distal cholangiocarcinoma.

17. The antibody or antigen-binding fragment thereof of claim 10 or claim 11, that is useful for treating a colon or rectal cancer, wherein the colon or rectal cancer is colon adenocarcinoma, rectal adenocarcinoma, gastrointestinal carcinoid tumors, primary colorectal lymphomas, gastrointestinal stromal tumors, leiomyosarcomas, melanoma, sarcoma, Turcot syndrome, Peutz-Jeghers syndrome, familial colorectal cancer, or juvenile polyposis coli.

18. The antibody or antigen-binding fragment thereof of claim 10 or claim 11, that is useful for treating an esophageal cancer, wherein the esophageal cancer is squamous cell carcinoma, adenocarcinoma, choriocarcinoma, lymphoma, melanoma, or sarcoma.

19. The antibody or antigen-binding fragment thereof of claim 10 or claim 11, that is useful for treating a head or neck squamous cell cancer, wherein the head or neck squamous cell cancer is conventional type squamous cell carcinoma, verrucous carcinoma, basaloid squamous cell carcinoma, papillary squamous cell carcinoma, spindle cell carcinoma, acantholytic squamous cell carcinoma, adenosquamous carcinoma, carcinoma cuniculatum, nasopharyngeal carcinoma, lymphoepithelial carcinoma, laryngeal or hypopharyngeal cancer, nasal cavity or paranasal sinus cancer, nasopharyngeal cancer, oral and oropharyngeal cancer, salivary gland cancer, HPV-negative squamous cell carcinoma, or HPV-induced squamous cell carcinoma.

20. The antibody or antigen-binding fragment thereof of claim 10 or claim 11, that is useful for treating a kidney cancer, wherein the kidney cancer is renal cell carcinoma, renal pelvis carcinoma, transitional cell carcinoma, squamous cell carcinoma, juxtaglomerular cell tumor (reninoma), angiomyolipoma, bellini duct carcinoma, clear cell sarcoma of the kidney, mesoblastic nephroma, Wilms' tumor, mixed epithelial stromal tumor, clear cell adenocarcinoma, inverted papilloma, renal lymphoma, teratoma, carcinosarcoma, carcinoid tumor of the renal pelvis, kidney renal clear cell carcinoma, kidney renal papillary cell carcinoma sarcomotoid renal cell carcinoma, chromophobe renal cell carcinoma, renal medullary carcinoma, collecting duct renal cell carcinoma, unclassified renal cell carcinoma, renal oncocytoma, angiomyolipoma, or clear cell papillary carcinoma.

21. The antibody or antigen-binding fragment thereof of claim 10 or claim 11, that is useful for treating a liver cancer, wherein the liver cancer is hepatocellular carcinoma, fibrolamellar hepatocellular carcinoma, cholangiocarcinoma, mucinous cystic neoplasm, intraductal papillary biliary neoplasm, hepatoblastoma, cholangiocellular cystadenocarcinoma, angiosarcoma, hemangioendothelioma, embryonal sarcoma, fibrosarcoma, leiomyosarcoma, rhabdomyosarcoma, carcinosarcomas, teratomas, yolk sac tumours, carcinoid tumours, lymphomas, or liver metastasis.

22. The antibody or antigen-binding fragment thereof of claim 10 or claim 11, that is useful for treating a lung cancer, wherein the lung cancer is non-small cell lung carcinoma, small-cell lung carcinoma, lung adenocarcinoma, lung squamous cell carcinoma, large cell carcinoma, carcinoid tumors, bronchial gland carcinoma, carcinosarcoma, pulmonary blastoma, giant or spindle cell carcinoma, or sarcomatoid carcinoma.

23. The antibody or antigen-binding fragment thereof of claim 10 or claim 11, that is useful for treating a mesothelioma, wherein the mesothelioma is malignant mesothelioma, or malignant pleural mesothelioma.

24. The antibody or antigen-binding fragment thereof of claim 10 or claim 11, that is useful for treating a cystadenocarcinoma, wherein the cystadenocarcinoma is ovarian serous cystadenocarcinoma.

25. The antibody or antigen-binding fragment thereof of claim 10 or claim 11, that is useful for treating an adenocarcinoma, wherein the adenocarcinoma is pancreatic adenocarincoma.

26. The antibody or antigen-binding fragment thereof of claim 10 or claim 11, that is useful for treating a pheochromocytoma or paraganglioma.

27. The antibody or antigen-binding fragment thereof of claim 10 or claim 11, that is useful for treating a prostate adenocarcinoma.

28. The antibody or antigen-binding fragment thereof of claim 10 or claim 11, that is useful for treating a sarcoma.

29. The antibody or antigen-binding fragment thereof of claim 10 or claim 11, that is useful for treating a skin cutaneous melanoma.

30. The antibody or antigen-binding fragment thereof of claim 10 or claim 11, that is useful for treating a stomach adenocarcinoma.

31. The antibody or antigen-binding fragment thereof of claim 10 or claim 11, that is useful for treating a testicular germ cell cancer.

32. The antibody or antigen-binding fragment thereof of claim 10 or claim 11, that is useful for treating a thyroid carcinoma.

33. The antibody or antigen-binding fragment thereof of claim 10 or claim 11, that is useful for treating a uterine cancer, wherein the uterine cancer is uterine carcinosarcoma, or uterine corpus endometrial carcinoma.

34. The antibody or antigen-binding fragment thereof of claim 10 or claim 11, that is useful for treating a uveal melanoma.

35. An antibody or antigen-binding fragment thereof comprising:
(a) a variable heavy chain, wherein the variable heavy chain comprises a reconstructed polypeptide consensus sequence having at least 95% sequence identity to an amino acid sequence selected from any one of SEQ ID NOs: 1-271; and/or
(b) a variable light chain, wherein the variable light chain comprises a reconstructed polypeptide consensus sequence having at least 95% sequence identity to an amino acid sequence selected from any one of SEQ ID NOs: 272-542.

36. A hybridoma that produces the antibody or antigen-binding fragment thereof of any one of claims 1-35.

37. A fusion protein that comprises the antibody or antigen-binding fragment thereof of any one of claims 1-35.

38. A chimeric antigen receptor or a T cell receptor fusion protein that comprises:
(a) an antigen-binding fragment of any one of claims 1-35;
(b) a transmembrane domain; and
(c) an intracellular signaling domain.

39. A T cell receptor fusion protein that comprises:
(a) the antibody or antigen-binding fragment thereof of any one of claims 1-35; and
(b) a T cell receptor (TCR) subunit.

40. The T cell receptor fusion protein of claim 39, wherein the antibody or antigen binding fragment thereof comprises a human or humanized anti-cancer antigen binding domain.

41. The T cell receptor fusion protein of any one of claims 39-40, wherein the TCR subunit comprises;
(a) at least a portion of a TCR extracellular domain,
(b) a transmembrane domain; and
(c) a TCR intracellular domain comprising a stimulatory domain from an intracellular signaling domain.

42. The T cell receptor fusion protein of claim 41, wherein the extracellular, transmembrane, and intracellular signaling domains of the TCR subunit are either derived from only CD3 epsilon or only CD3 gamma.

43. The T cell receptor fusion protein of any one of claims 41-42, wherein the antibody or antigen-binding fragment thereof and the TCR extracellular domain are connected by a linker sequence.

44. The T cell receptor fusion protein of claim 43, wherein the linker sequence comprises the sequence of (G₄S)ₙ, wherein G is glycine, S is serine, and n=1 to 4.

45. An isolated recombinant nucleic acid molecule encoding the T cell receptor fusion protein of any one of claims 41-44.

46. A vector that comprises the isolated recombinant nucleic acid molecule of claim 45.

47. A host cell that comprises the isolated recombinant nucleic acid of claim 45 or the vector of claim 46.

48. The host cell of claim 47, wherein the host cell is a T cell.

49. A T cell expressing the T cell receptor fusion protein of any one of claims 38-44.

50. The T cell of claim 49, wherein the T cell receptor fusion protein is functionally integrated with an endogenous T cell receptor.

51. The T cell of any one of claims 49-50, wherein the T cell is a CD8+ or CD4+ T-cell.

52. An immunoconjugate comprising the antibody or the antigen binding fragment thereof of any one of claims 1-35, and a therapeutic agent.

53. A pharmaceutical composition or a medicament that comprises the antibody or antigen-binding fragment thereof of any one of claims 1-35 and a pharmaceutically acceptable carrier, excipient or diluent.

54. The pharmaceutical composition of claim 53, further comprising a second therapeutic agent.

55. The pharmaceutical composition of claim 54, wherein the second therapeutic agent comprises a cancer chemotherapeutic agent, radiation therapy, a cytotoxic agent, another antibody, a NSAID, a corticosteroid, a dietary supplement such as an antioxidant, or a combination thereof.

56. The pharmaceutical composition of any one of claims 53-55, wherein the second therapeutic agent comprises a cancer chemotherapeutic agent.

57. The pharmaceutical composition of any one of claims 53-56, formulated for administration via a subcutaneous, intravenous, intradermal, intraperitoneal, intramuscular, intracerebroventricular, intracranial, intracelial, or intracerebellar administration route.

58. The pharmaceutical composition of any one of claims 53-57, in an aqueous or in a lyophilized form.

59. The pharmaceutical composition of any one of claims 53-58, contained in a delivery device selected from the group consisting of a syringe, a blunt tip syringe, a catheter, and an implantable pump.

60. Use of the antibody or antigen binding fragment of any one of claims 1-35 for treating a cancer.

61. Use of the antibody or antigen binding fragment thereof of any one of claims 1-35 or immunoconjugate of claim 52 in the manufacture of a medicament.

62. The use of claim 61, wherein the medicament is for treatment of a cancer.

63. A method for treating a subject suffering from a cancer, the method comprising administering to the subject a therapeutically effective amount of the antibody or antigen-binding fragment thereof of any one of claims 1-35.

64. The method of claim 63, wherein the antibody or antigen-binding fragment thereof is cytolytic to a tumor cell.

65. The method of claim 63 or claim 64, wherein the antibody or antigen-binding fragment thereof inhibits tumor growth.

66. The method of any one of claims 63-65, wherein the cancer is a bladder cancer, and wherein the bladder cancer is bladder urothelial carcinoma, squamous cell carcinoma of the bladder, adenocarcinoma of the bladder, or small cell carcinoma of the bladder.

67. The method of any one of claims 63-65, wherein the cancer is a brain cancer, and wherein the brain cancer is glioma, meningioma pituitary adenoma, vestibular schwannoma, nerve sheath tumor, primitive neuroectodermal tumor (medduloblastoma), ependymomas, astrocytomas, oligodendrogliomas, brainstem glioma, optic nerve glioma, mixed glioma (e.g., oligoastrocytoma), high-grade glioma, or low-grade glioma.

68. The method of any one of claims 63-65, wherein the cancer is a breast cancer or breast carcinoma, and wherein the breast cancer or breast carcinoma is invasive ductal carcinoma, ductal carcinoma in situ, invasive lobular carcinoma, lobular carcinoma in situ, inflammatory breast cancer, male breast cancer, phyllodes tumors of the breast, Paget's disease of the nipple, Angiosarcomas, or metastatic breast cancer.

69. The method of any one of claims 63-65, wherein the cancer is a cervical cancer, and wherein the cervical cancer is cervical squamous cell carcinoma, adenocarcinoma, adenosquamous carcinoma, small cell carcinoma, neuroendocrine tumor, glassy cell carcinoma, villoglandular adenocarcinoma, endocervical (NOS) type adenocarcinoma, mucinous adenocarcinoma, minimal deviation adenocarcinoma (mucinous and endometrioid types), enteric/GI type adenocarcinoma, endometrioid type adenocarcinoma, clear cell adenocarcinoma, serous adenocarcinoma, mesonephric adenocarcinoma, adenoid basal carcinoma, or adenoid cystic carcinoma.

70. The method of any one of claims 63-65, wherein the cancer is a cholangiocarcinoma, and wherein the cholangiocarcinoma is intrahepatic cholangiocarcinoma, hilar cholangiocarcinoma, or distal cholangiocarcinoma.

71. The method of any one of claims 63-65, wherein the cancer is a colon or rectal cancer, and wherein the colon or rectal cancer is colon adenocarcinoma, rectal adenocarcinoma, gastrointestinal carcinoid tumors, primary colorectal lymphomas, gastrointestinal stromal tumors, leiomyosarcomas, melanoma, sarcoma, Turcot syndrome, Peutz-Jeghers syndrome, familial colorectal cancer, or juvenile polyposis coli.

72. The method of any one of claims 63-65, wherein the cancer is an esophageal cancer, and wherein the esophageal cancer is squamous cell carcinoma, adenocarcinoma, choriocarcinoma, lymphoma, melanoma, or sarcoma.

73. The method of any one of claims 63-65, wherein the cancer is a head or neck squamous cell cancer, and wherein the head or neck squamous cell cancer is conventional type squamous cell carcinoma, verrucous carcinoma, basaloid squamous cell carcinoma, papillary squamous cell carcinoma, spindle cell carcinoma, acantholytic squamous cell carcinoma, adenosquamous carcinoma, carcinoma cuniculatum, nasopharyngeal carcinoma, lymphoepithelial carcinoma, laryngeal or hypopharyngeal cancer, nasal cavity or paranasal sinus cancer, nasopharyngeal cancer, oral and oropharyngeal cancer, salivary gland cancer, HPV-negative squamous cell carcinoma, or HPV-induced squamous cell carcinoma.

74. The method of any one of claims 63-65, wherein the cancer is a kidney cancer, and wherein the kidney cancer is renal cell carcinoma, renal pelvis carcinoma, transitional cell carcinoma, squamous cell carcinoma, juxtaglomerular cell tumor (reninoma), angiomyolipoma, bellini duct carcinoma, clear cell sarcoma of the kidney, mesoblastic nephroma, Wilms' tumor, mixed epithelial stromal tumor, clear cell adenocarcinoma, inverted papilloma, renal lymphoma, teratoma, carcinosarcoma, carcinoid tumor of the renal pelvis, kidney renal clear cell carcinoma, kidney renal papillary cell carcinoma sarcomotoid renal cell carcinoma, chromophobe renal cell carcinoma, renal medullary carcinoma, collecting duct renal cell carcinoma, unclassified renal cell carcinoma, renal oncocytoma, angiomyolipoma, or clear cell papillary carcinoma.

75. The method of any one of claims 63-65, wherein the cancer is a liver cancer, and wherein the liver cancer is hepatocellular carcinoma, fibrolamellar hepatocellular carcinoma, cholangiocarcinoma, mucinous cystic neoplasm, intraductal papillary biliary neoplasm, hepatoblastoma, cholangiocellular cystadenocarcinoma, angiosarcoma, hemangioendothelioma, embryonal sarcoma, fibrosarcoma, leiomyosarcoma, rhabdomyosarcoma, carcinosarcomas, teratomas, yolk sac tumours, carcinoid tumours, lymphomas, or liver metastasis.

76. The method of any one of claims 63-65, wherein the cancer is a lung cancer, and wherein the lung cancer is non-small cell lung carcinoma, small-cell lung carcinoma, lung adenocarcinoma, lung squamous cell carcinoma, large cell carcinoma, carcinoid tumors, bronchial gland carcinoma, carcinosarcoma, pulmonary blastoma, giant or spindle cell carcinoma, or sarcomatoid carcinoma.

77. The method of any one of claims 63-65, wherein the cancer is a mesothelioma, and wherein the mesothelioma is malignant mesothelioma, or malignant pleural mesothelioma.

78. The method of any one of claims 63-65, wherein the cancer is a cystadenocarcinoma, and wherein the cystadenocarcinoma is ovarian serous cystadenocarcinoma.

79. The method of any one of claims 63-65, wherein the cancer is an adenocarcinoma, and wherein the adenocarcinoma is pancreatic adenocarcinoma.

80. The method of any one of claims 63-65, wherein the cancer is a pheochromocytoma or paraganglioma.

81. The method of any one of claims 63-65, wherein the cancer is a prostate adenocarcinoma.

82. The method of any one of claims 63-65, wherein the cancer is a sarcoma.

83. The method of any one of claims 63-65, wherein the cancer is a skin cutaneous melanoma.

84. The method of any one of claims 63-65, wherein the cancer is a stomach adenocarcinoma.

85. The method of any one of claims 63-65, wherein the cancer is a testicular germ cell cancer.

86. The method of any one of claims 63-65, wherein the cancer is a thyroid carcinoma.

87. The method of any one of claims 63-65, wherein the cancer is a uterine cancer, and wherein the uterine cancer is: uterine carcinosarcoma, or uterine corpus endometrial carcinoma.

88. The method of any one of claims 63-65, wherein the cancer is a uveal melanoma.

89. The method of any one of claims 63-88, wherein the antibody or antigen-binding fragment thereof is administered subcutaneously, intravenously, intradermally, intraperitoneally, orally, intramuscularly or intracranially.

90. The method of any one of claims 63-89, wherein the antibody or antigen-binding fragment thereof is administered to the subject in combination with a second therapeutic agent.

91. The method of claim 90, wherein the second therapeutic agent comprises a cancer chemotherapeutic agent, radiation therapy, a cytotoxic agent, another antibody, a NSAID, a corticosteroid, a dietary supplement such as an antioxidant, or a combination thereof.

92. The method of claim 91, wherein the anti-cancer agent is an anti-cancer antibody or a chemotherapeutic agent.

93. The method of any one of claims 90-92, wherein the second therapeutic agent is administered prior to, concurrently, or after administering the antibody or antigen binding fragment.

94. An isolated nucleic acid molecule comprising at least one of:
(a) a nucleic acid sequence encoding a CDR-H1, wherein the nucleic acid sequence is selected from SEQ ID NOs: 2711-2981;
(b) a nucleic acid sequence encoding a CDR-H2, wherein the nucleic acid sequence is selected from SEQ ID NOs: 3253-3523;
(c) a nucleic acid sequence encoding a CDR-H3, wherein the nucleic acid sequence is selected from SEQ ID NOs: 3795-4065;
(d) a nucleic acid sequence encoding a CDR-L1, wherein the nucleic acid sequence is selected from SEQ ID NOs: 2982-3252;
(e) a nucleic acid sequence encoding a CDR-L2, wherein the nucleic acid sequence is selected from SEQ ID NOs: 3524-3794; or
(f) a nucleic acid sequence encoding a CDR-L3, wherein the nucleic acid sequence is selected from SEQ ID NOs: 4066-4336.

95. An isolated nucleic acid molecule comprising a nucleic acid sequence encoding a heavy chain polypeptide of an antibody, wherein the nucleic acid sequence is selected from any one of SEQ ID NOs: 2169-2439.

96. An isolated nucleic acid molecule comprising a nucleic acid sequence encoding a light chain polypeptide of an antibody, wherein the nucleic acid sequence is selected from any one of SEQ ID NOs: 2440-2710.

97. A vector comprising the isolated nucleic acid molecule of any one of claims 94-96.

98. The vector of claim 97, wherein the isolated nucleic acid is operably linked to a regulatory control sequence.

99. A host cell comprising the vector of any one of claims 97-98 or the isolated nucleic acid molecule of any one of claims 94-96.

100. A method of producing an antibody or an antigen binding fragment thereof, the method comprising:
(a) culturing the host cell of claim 99 in a medium under conditions permitting expression of a polypeptide encoded by the isolated nucleic acid molecule and assembling of the antibody or an antigen binding fragment thereof; and
(b) purifying the antibody or antigen binding fragment thereof from the cultured cell or the medium of the cell.

101. A kit comprising a therapeutically effective amount of at least one of the antibody or antigen binding fragment thereof of any one of claims 1-35.

102. The kit of claim 101, further comprising a therapeutically effective amount of a second therapeutic agent.

103. The kit of claim 102, wherein the second therapeutic agent is an anti-cancer agent, radiation therapy, a cytotoxic agent, a NSAID, a corticosteroid, a dietary supplement such as an antioxidant, or a combination thereof.

104. The kit of claim 103, wherein the anti-cancer agent is an anti-cancer antibody or a chemotherapeutic agent.

105. The kit of any one of claims 101-104, wherein the antibody or antigen binding fragment thereof is in a lyophilized or an aqueous form.

106. The kit of any one of claims 101-105, further comprising a reconstitution solution or a diluent.

The application's sequence listing, which the Patent Office published only in electronic form, follows.

SEQUENCE LISTING (4538 sequences)

SEQ ID NO: 1 - protein, 220 aa, Artificial Sequence
  Synthetic polypeptide representing artificial human antibody VH chain
CEMQLLQSGGGLVQPGGSLRLSCVASEVTFNTYGMSWVRQAPGKGLEWVSYMSGGGGSIFYADSVKGRFTISRDNSKNTLYLQMNSLRGEDTAVYFCARVTLGSYFYGMDVWGQGTTVTVSSASTKGPSVFPLAPSSKSTSGGTAALGCLVKDYFPEPVTVSWNSGALTSGVHTFPAVLQSSGLYSLSSVVTVPSSSLGTQTYICNVNHKPSNTKVDKKV

SEQ ID NO: 2 - protein, 220 aa, Artificial Sequence
  Synthetic polypeptide representing artificial human antibody VH chain
VVQLVESGGGLVQPGGSLRLSCAASGFTFSSYWMSWVRQAPGKGLEWVANIKQDGSEKYYVDSVKGRFTISRDNAKKSLYLQMNSLRAEDTAVYYCARDGGSGSYFDCFDYWGQGTLVTVSSASTKGPSVFPLAPSSKSTSGGTAALGCLVKDYFPEPVTVSWNSGALTSGVHTFPAVLQSSGLYSLSSVVTVPSSSLGTQTYICNVNHKPSNTKVDKSE

SEQ ID NO: 3 - protein, 223 aa, Artificial Sequence
  Synthetic polypeptide representing artificial human antibody VH chain
EVQLVESGGGLIQPGRSLRLSCAASGFTFEDYAMHWVRQAPGKGLEWVSGISWNSGNIGYADSVKGRFTISRDNAKNSLYLQMHSLRPEDTALYYCAKDINFFGLGTGGGAMDVWGQGTTVTVSSASTKGPSVFPLAPSSKSTSGGTAALGCLVKDYFPEPVTVSWNSGALTSGVHTFPAVLQSSGLYSLSSVVTVPSSSLGTQTYICNVNHKPSNTKVDKRE

SEQ ID NO: 4 - protein, 119 aa, Artificial Sequence
  Synthetic polypeptide representing artificial human antibody VH chain
QITLKESGPTLVKPTQTLTLTCTFSGFSLSTSGVGVGWIRQPPGKALEWLALIYWDDDKRYSPSLKSRLTITKDTSKNQVVLTMTNMDPVDTATYYCAHRAIVGLFDYWGQGTLVTVSS

SEQ ID NO: 5 - protein, 223 aa, Artificial Sequence
  Synthetic polypeptide representing artificial human antibody VH chain
QVQLVQSGAEVKKPGASVKISCKTSGYTFTTYYMHWVRQAPGQGLEWMGIINTSGGSTSYAQKFQGRVTMTRDTSTNTVYMELSSLRYEDTAMYYCARGGDGGPQDAFDIWGQGTKVTVSSASPTSPKVFPLSLCSTQPDGNVVIACLVQGFFPQEPLSVTWSESGQGVTARNFPPSQDASGDLYTTSSQLTLPATQCLAGKSVTCHVKHYTNPSQDVTVPCP

SEQ ID NO: 6 - protein, 221 aa, Artificial Sequence
  Synthetic polypeptide representing artificial human antibody VH chain
VQLVDSGGGLVQPGRSLRLSCAASGFVFDDYAMHWVRQVPGKGLEWVSGISWNSVSIGYADSVKGRFTISRDNAKNSLYLQMNSLRPEDAALYYCVKSFSAEYYYYYYGMDVWGQGTTVTVSSASTKGPSVFPLAPSSKSTSGGTAALGCLVKDYFPEPVTVSWNSGALTSGVHTFPAVLQSSGLYSLSSVVTVPSSSLGTQTYICNVNHKPSNTKVDKSE

SEQ ID NO: 7 - protein, 122 aa, Artificial Sequence
  Synthetic polypeptide representing artificial human antibody VH chain
QVQLVQSGAEVKKPGASVKVSCKASGYTFTNYGFSWVRQAPGQGLEWMGRITTYNRDTIYAQKFQGRVTMTTDTSTSTAYMELRSLRSDDTAVYFCARVVPGDSVYGAFDIWGQGTMVTVSS

SEQ ID NO: 8 - protein, 222 aa, Artificial Sequence
  Synthetic polypeptide representing artificial human antibody VH chain
EVQLVESGGGVVQPGGSLRLSCTASGFTFDDYAMHWVRQAPGKGLEWVSLISGDGGGTYYADSVKGRFTISRDNSKNSLYLQMNSLRTEDTALYYCAKRTPFGEWAFDYWGQGTLVTVSSASPTSPKVFPLSLCSTQPDGNVVIACLVQGFFPQEPLSVTWSESGQGVTARNFPPSQDASGDLYTTSSQLTLPATQCLAGKSVTCHVKHYTNPSQDVTVPCP

SEQ ID NO: 9 - protein, 124 aa, Artificial Sequence
  Synthetic polypeptide representing artificial human antibody VH chain
EVQLVESGGGVVQPGGSLRLSCAASGFTFSYYGMYWVRQAPGKGLEWVTFIRYDGRNKYYADSVKGRFTISRDNSKNTLYLEMNTLRTEDTAMYFCAKDPGTFRDHLWSGVDYWGQGTLVTVSS

SEQ ID NO: 10 - protein, 221 aa, Artificial Sequence
  Synthetic polypeptide representing artificial human antibody VH chain
EVQLVESGGGLVQPGRSLRLSCAASGFPFGDYAMHWVRQAPGKGLEWVSGIGWDSGGIGYADSVKGRFTISRDIAKNSLYLEINSLRPDDTALYYCAKAAATLPYFRFAMDVWGQGTPVTVSSASTKGPSVFPLAPSSKSTSGGTAALGCLVKDYFPEPVTVSWNSGALTSGVHTFPAVLQSSGLYSLSSVVTVPSSSLGTQTYICNVNHKPSNTKVDKNV

SEQ ID NO: 11 - protein, 222 aa, Artificial Sequence
  Synthetic polypeptide representing artificial human antibody VH chain
PGLLVQSGGEVKKPGASVRVSCKASGYIDINNGISWVRQAPGHGLEWMGWISIYSGNTKYAQKFQGRVTMTTATSTSTVYMELRSLTSDDTAVYYCARVGVFKGLAPFGGFDPWGQGTLVTVSSASTKGPSVFPLAPCSRSTSESTAALGCLVKDYFPEPVTVSWNSGALTSGVHTFPAVLQSSGLYSLSSVVTVPSSSLGTKTYTCNVDHKPSNTKVDKRV

SEQ ID NO: 12 - protein, 118 aa, Artificial Sequence
  Synthetic polypeptide representing artificial human antibody VH chain
LLQLVESGGGVVQPGRSLRLSCAASGFTFTRHGFHWVRQAPGKGLEWVAVISSDGRKIHYTDSVKGRFVISRDDSDNTVYLHMNSLRLGDTALYYCARDSGGTPGPYWGQGTLVTVSS

SEQ ID NO: 13 - protein, 222 aa, Artificial Sequence
  Synthetic polypeptide representing artificial human antibody VH chain
CEVQLLESGGGLVQPGGSLTLSCVGSRFTFSSYAMNWVRQSPGRGLEWVASISATTGSTYYTDSVEGRFTISRDNSRDTLYLQMNSLRADDTALYYCVRSFVGAVPAYPNFDFWGPGTLVTVSSASTKGPSVFPLAPCSRSTSESTAALGCLVKDYFPEPVTVSWNSGALTSGVHTFPAVLQSSGLYSLSSVVTVTSSNFGTQTYTCNVDHKPSNTKVDKTV

SEQ ID NO: 14 - protein, 225 aa, Artificial Sequence
  Synthetic polypeptide representing artificial human antibody VH chain
QVQLQQSGPGLVKPSQTLSLTCAISGDGVSSNSASWNWVRQSPSRGLEWLGRTYYRSKWYNDYAVSVKSRMTIKSDTSKNQFSLQLNSVTPEDTAVYYCVRGVVGATLDNWGQGTLVTVSSGSASAPTLFPLVSCENSPSDTSSVAVGCLAQDFLPDSITFSWKYKNNSDISSTRGFPSVLRGGKYAATSQVLLPSKDVMQGTDEHVVCKVQHPNGNKEKNVPLP

SEQ ID NO: 15 - protein, 222 aa, Artificial Sequence
  Synthetic polypeptide representing artificial human antibody VH chain
QVQLVESGGGVVQPGGSLRLSCGASGFAFSSNGMHWVRQAPGKGLEWVAFIHYDGRNKHYTDSVKGRFAISVDDSKTTLYLQMSSLKTEDTAVYYCVKDSRVTGQSSGYIFDSWGQGTLVTVSSASTKGPSVFPLAPCSRSTSESTAALGCLVKDYFPEPVTVSWNSGALTSGVHTFPAVLQSSGLYSLSSVVTVPSSNFGTQTYTCNVDHKPSNTKVDKTE

SEQ ID NO: 16 - protein, 216 aa, Artificial Sequence
  Synthetic polypeptide representing artificial human antibody VH chain
VVQLVESGGGLVKPGGSLRLSCAASGITFSSYDMNWVRQAPGKGLEWVSSISSSSSSIYFADSVKGRFTISRDNAKNSLYLHMNSLRAEDTAVYYCARPRLGWYFDLWGRGTLVTVASASTKGPSVFPLAPSSKSTSGGTAALGCLVKDYFPEPVTVSWNSGALTSGVHTFPAVLQSSGLYSLSSVVTVPSSSLGTQTYICNVNHKPSNTKVDKRV

SEQ ID NO: 17 - protein, 218 aa, Artificial Sequence
  Synthetic polypeptide representing artificial human antibody VH chain
QVQLVQSGGEVKKPGASVKVSCKASGYNFTNYGISWVRQAPGQGLEWMGWISAYNGNTNYAQKLQGRVTMTTDTPTSTAYMELRSLRSDDTAVYYCARETAGQLIPFDYWGQGTLVTVSSASTKGPSVFPLAPSSKSTSGGTAALGCLVKDYFPEPVTVSWNSGALTSGVHTFPAVLQSSGLYSLSSVVTVPSSSLGTQTYICNVNHKPSNTKVDKSE

SEQ ID NO: 18 - protein, 222 aa, Artificial Sequence
  Synthetic polypeptide representing artificial human antibody VH chain
VEQLVESGGGLVQPGGSLRLSCAASGFSFRSYEMNWVRQAPGKGLEWVSYIGIGGNTIYYADSVKGRFTISRDNAKNSLYLQMNSLRAEDTAVYYCARDYMGVDFYYYYGMDVWGQGTTVTVSSASTKGPSVFPLAPSSKSTSGGTAALGCLVKDYFPEPVTVSWNSGALTSGVHTFPAVLQSSGLYSLSSVVTVPSSSLGTQTYICNVNHKPSNTKVDKRV

SEQ ID NO: 19 - protein, 219 aa, Artificial Sequence
  Synthetic polypeptide representing artificial human antibody VH chain
QVQLVQSGAEVKKPGASVKVSCKASGYIFTSYAIHWVRQAPGQRLEWMGWINAGNGNTKYSQKFQGRVTITRDTSANTAYMELSSLRSEDTAIYYCARDIAVAITNYFGSWGQGTLVTVSSASTKGPSVFPLAPSSKSTSGGTAALGCLVKDYFPEPVTVSWNSGALTSGVHTFPAVLQSSGLYSLSSVVTVPSSSLGTQTYICNVNHKPSNTKVDKKV

SEQ ID NO: 20 - protein, 216 aa, Artificial Sequence
  Synthetic polypeptide representing artificial human antibody VH chain
QVQLQESGPGLVRPSETLSLTCDVSGYLISSGYYWGWVRQPPGKGLEWIGSVYHSGNAYYNPSLKGRVTMSVDTSKNQFSLKLTSVAAEDTAVYYCAREHRSGYQRYWGQGTLVTVSSASTKGPSVFPLAPSSKSTSGGTAALGCLVKDYFPEPVTVSWNSGALTSGVHTFPAVLQSSGLYSLSSVVTVPSSSLGTQTYICNVNHKPSNTKVDKKV

SEQ ID NO: 21 - protein, 223 aa, Artificial Sequence
  Synthetic polypeptide representing artificial human antibody VH chain
QITLKESGPTLVKPTQTLTLTCTFSGFSLNTSGVGVGWIRQPPGKALEWLALIYWDDDERYRPSLKNRLTITRDTSKNQVVLTMTNMDPVDTATYYCAHFSTVINFGHWGQGTLVTVSSGSASAPTLFPLVSCENSPSDTSSVAVGCLAQDFLPDSITFSWKYKNNSDISSTRGFPSVLRGGKYAATSQVLLPSKDVMQGTDEHVVCKVQHPNGNKEKNVPLP

SEQ ID NO: 22 - protein, 115 aa, Artificial Sequence
  Synthetic polypeptide representing artificial human antibody VH chain
EVQLVESGGGLVKPGGSLRLSCVGSGFTFSNYSMNWVRQAPGRGLEWVSSISWGSSYINYADSVKGRFTISRDNAKNSLYLQMTSLTAEDTAVYYCACRRIYQGFDPWGQGTLVT

SEQ ID NO: 23 - protein, 215 aa, Artificial Sequence
  Synthetic polypeptide representing artificial human antibody VH chain
EVQLVESGGGLVKPGGSLRLSCAASGFTFSSYSMNWVRQAPGKGLEWVSSISSSSRYIYYADSVKGRFTSSRDNAKNSLYLQMNSLRAEDTAVYYCARDRATSFDYWGQGTLVTVSSASTKGPSVFPLAPSSKSTSGGTAALGCLVKDYFPEPVTVSWNSGALTSGVHTFPAVLQSSGLYSLSSVVTVPSSSLGTQTYICNVNHKPSNTKVDKKV

SEQ ID NO: 24 - protein, 213 aa, Artificial Sequence
  Synthetic polypeptide representing artificial human antibody VH chain
PVLLQESGPGLVKPSETLSLTCTVSGDSMSFYYWTWIRQPPGKGLEWIGYIYYSGNRNYNPSLNSRVTISVDTSKNEVSLKLTSVTAADTAAYYCARGRGEMDVWGQGTTVTVSSASTKGPSVFPLAPSSKSTSGGTAALGCLVKDYFPEPVTVSWNSGALTSGVHTFPAVLQSSGLYSLSSVVTVPSSSLGTQTYICNVNHKPSNTKVDKRV

SEQ ID NO: 25 - protein, 220 aa, Artificial Sequence
  Synthetic polypeptide representing artificial human antibody VH chain
QVQLQESGPGLVKPTQTLSLTCTVSGGSISSGSYYWNWIRQPAGKGLEWIGNIYTSGNTDYNPSLKSRVTISLDTSKNQVSLNLTSVTAADTAVYYCATTPSSSWYWYFDPWGQGTLVTVSSASTKGPSVFPLAPSSKSTSGGTAALGCLVKDYFPEPVTVSWNSGALTSGVHTFPAVLQSSGLYSLSSVVTVPSSSLGTQTYICNVNHKPSNTKVDKSE

SEQ ID NO: 26 - protein, 221 aa, Artificial Sequence
  Synthetic polypeptide representing artificial human antibody VH chain
EVQLVESGGGLVKPGGSLRLSCAGSGFSFSSYSMNWVRQAPGKGLEWVSSISSKSSSKNYIDSVKNRFIISRDNAKNSLYLQMNSLRAEDTAVYYCARDLELIIAAGAPLDHWGQGTLVTVSSASTKGPSVFPLAPSSKSTSGGTAALGCLVKDYFPEPVTVSWNSGALTSGVHTFPAVLQSSGLYSLSSVVTVPSSSLGTQTYICNVNHKPSNTKVDKRE

SEQ ID NO: 27 - protein, 222 aa, Artificial Sequence
  Synthetic polypeptide representing artificial human antibody VH chain
PLQLQESGPGLVKPSETLSLTCTVSGGSISRSPYFWGWIRQPPGRGLEWIASIYYRGTTSYNPSLKSRVTISVDTSKNQFSLKLRSVTAADTAVFYCARLVTSPEEGGPWFDPWGRGTLVTVSSASTKGPSVFPLAPSSKSTSGGTAALGCLVKDYFPEPVTVSWNSGALTSGVHTFPAVLQSSGLYSLSSVVTVPSSSLGTQTYICNVNHKPSNTKVDKKV

SEQ ID NO: 28 - protein, 119 aa, Artificial Sequence
  Synthetic polypeptide representing artificial human antibody VH chain
QVQLVESGGGVVQPGRSLRLSCAASGFTFTSYGMHWVRQAPGKGLEWVALIWYDGSNKYYADSVKGRFTISRDNSKNTLYLQMNSLRAEDTAVYYCARDTEVGHHFDYWGQGTLITVSS

SEQ ID NO: 29 - protein, 219 aa, Artificial Sequence
  Synthetic polypeptide representing artificial human antibody VH chain
QVQLQESGPGLVKPSETLSLTCTVSSGSSGSYYLSWIRQPAGKGLEWIGRMYTSGSTHYNPSLKSRVTMSVDTSKNQFSLKLSSVTAADTAVYYCAKPWRSDGFDVWGQGTVVTVSSASPTSPKVFPLSLCSTQPDGNVVIACLVQGFFPQEPLSVTWSESGQGVTARNFPPSQDASGDLYTTSSQLTLPATQCLAGKSVTCHVKHYTNPSQDVTVPCP

SEQ ID NO: 30 - protein, 216 aa, Artificial Sequence
  Synthetic polypeptide representing artificial human antibody VH chain
QVQLVQSGAEVKKPGASVKVSCKASGYNFRDYYMHWVRQAPGQGLEWMGWINPNSGGTISAQNFQGRVTMTRDTSISTAYMEVNSLRSDDTAVYYCAVGMVTDGFEIWGQGTLVTVSSASTKGPSVFPLAPSSKSTSGGTAALGCLVKDYFPEPVTVSWNSGALTSGVHTFPAVLQSSGLYSLSSVVTVPSSSLGTQTYICNVNHKPSNTKVDKRV

SEQ ID NO: 31 - protein, 222 aa, Artificial Sequence
  Synthetic polypeptide representing artificial human antibody VH chain
QVQLQESGSGLVRPSQTLSLTCTVSGGSINSGDYHWSWIRQPPGKDLEYIGYIHHTGSAYYNPSLKSRVTISVDTSKNQHSLRLTSVTAADTAVYYCARLDLRTVRFDPWGQGTLVTVSSASPTSPKVFPLSLCSTQPDGNVVIACLVQGFFPQEPLSVTWSESGQGVTARNFPPSQDASGDLYTTSSQLTLPATQCLAGKSVTCHVKHYTNPSQDVTVPCP

SEQ ID NO: 32 - protein, 226 aa, Artificial Sequence
  Synthetic polypeptide representing artificial human antibody VH chain
PLQLQESGPGLAKPSETLSLTCTASGGSISSSGYYWGWIRQPPGKGLEWIGSIYYSGDTYYNPSLKSRVNIAVDTSQNQFSLKLNSVTAADTAVYYCARHSSGPPRLAFDIWGQGTMVTVSSGSASAPTLFPLVSCENSPSDTSSVAVGCLAQDFLPDSITFSWKYKNNSDISSTRGFPSVLRGGKYAATSQVLLPSKDVMQGTDEHVVCKVQHPNGNKEKNVPLP

SEQ ID NO: 33 - protein, 218 aa, Artificial Sequence
  Synthetic polypeptide representing artificial human antibody VH chain
QVQLVESGGGVVQPGRSLRLSCAASGFTFSSYGMHWVRQVPGKGLEGVAVISHDGSNKYYADSVKGRFTISRDNSKNTLYLQMNSLRVEDTAVYYCAKDFAMPTVTTDYWGQGTLVTVSSASTKGPSVFPLAPSSKSTSGGTAALGCLVKDYFPEPVTVSWNSGALTSGVHTFPAVLQSSGLYSLSSVVTVPSSSLGTQTYICNVNHKPSNTKVDKNE

SEQ ID NO: 34 - protein, 121 aa, Artificial Sequence
  Synthetic polypeptide representing artificial human antibody VH chain
QITLKESGPTLVKPTQTLTLTCTFSGFSLTTSGVGVGWIRQPPGKALEWLALIYWDDDKRYSPSLRSRLTITKDTSKNQVVLTMTNMDPVDTATYYCVHRPSLAYWYFDVWGRGTLLTVSS

SEQ ID NO: 35 - protein, 219 aa, Artificial Sequence
  Synthetic polypeptide representing artificial human antibody VH chain
VVQLVESGGGLVQPGGSLRLSCAASGFTFSTYELNWVRQAPGKGLEWISYINTTSDPIYYADSVKGRFTISRDNAKNSVFLQMNSLRAEDTAVYYCVREGDSRKYYSLDYWGQGTLVTVSSASTKGPSVFPLAPSSKSTSGGTAALGCLVKDYFPEPVTVSWNSGALTSGVHTFPAVLQSSGLYSLSSVVTVPSSSLGTQTYICNVNHKPSNTKVDKRV

SEQ ID NO: 36 - protein, 218 aa, Artificial Sequence
  Synthetic polypeptide representing artificial human antibody VH chain
PVQLVQSGAEVKKPGSSVKVSCKASGGTFSSYAISWVRQAPGQGLEWMGGIIPIFGTANYAQKFQGRVTITADESTSTAYMELSSLRSEDTAVYYCARDPMWVSYAFDIWGQGTMVTVSSASTKGPSVFPLAPSSKSTSGGTAALGCLVKDYFPEPVTVSWNSGALTSGVHTFPAVLQSSGLYSLSSVVTVPSSSLGTQTYICNVNHKPSNTKVDKNE

SEQ ID NO: 37 - protein, 215 aa, Artificial Sequence
  Synthetic polypeptide representing artificial human antibody VH chain
PVQLQESGPGLVKPSETLSLTCTVSGGSISSDNYYWSWLRQHPGKGLEWIGYIYFSVTTYYNPSLKSRVTISLDTSKNQFSLKLSSVTAADTAVYYCASGYVSFDLWGQGTLVTVSSASTKGPSVFPLAPSSKSTSGGTAALGCLVKDYFPEPVTVSWNSGALTSGVHTFPAVLQSSGLYSLSSVVTVPSSSLGTQTYICNVNHKPSNTKVDKRV

SEQ ID NO: 38 - protein, 220 aa, Artificial Sequence
  Synthetic polypeptide representing artificial human antibody VH chain
QVQLQESGPGLVKPSETLSLTCNVSGASISSYYWSWIRQPPGKGLEWIGYLSYSGNTNSKPSLKSRVTISVDTSKNQFSLKLSSVTAADTAVYYCAREGAYESSGPDPFDIWGQGTMVTVSSASTKGPSVFPLAPSSKSTSGGTAALGCLVKDYFPEPVTVSWNSGALTSGVHTFPAVLQSSGLYSLSSVVTVPSSSLGTQTYICNVNHKPSNTKVDKRV

SEQ ID NO: 39 - protein, 220 aa, Artificial Sequence
  Synthetic polypeptide representing artificial human antibody VH chain
QVQVVQSGAEVKKPGASVKISCKASGNTFTTYTIQWVRQVPGQRLEWMGWINAGNGDIKYSQKFQDRVTITRDTSANTAYMELSSLRYEDTAVYFCASLFLTYYGSGTYYRWGQGTLVTVSSASTKGPSVFPLAPSSKSTSGGTAALGCLVKDYFPEPVTVSWNSGALTSGVHTFPAVLQSSGLYSLSSVVTVPSSSLGTQTYICNVNHKPSNTKVDKSE

SEQ ID NO: 40 - protein, 216 aa, Artificial Sequence
  Synthetic polypeptide representing artificial human antibody VH chain
EVQLLESGGGLVQPGGSLRLSCAASGFTFSSYAMSWVRQAPGKGLEWVSTISGSGHSTYYADSVKGRFTISRDNSKNTLYLQMNSLRAEDTAVYYCAKSTLGGGFDFWGQGTLVTVSSASTKGPSVFPLAPSSKSTSGGTAALGCLVKDYFPEPVTVSWNSGALTSGVHTFPAVLQSSGLYSLSSVVTVPSSSLGTQTYICNVNHKPSNTKVDKKV

SEQ ID NO: 41 - protein, 223 aa, Artificial Sequence
  Synthetic polypeptide representing artificial human antibody VH chain
VVQLVESGGGVVRPGGSLRLSCAASGFTFDDYGMSWVRQAPGKGLEWVSGINWNGGSTGYADSVKGRFTISRDNAKNSLYLQMNSLRAEDTALYHCARVGSSSWYSSGRSPFDYWGQGTLVTVSSASTKGPSVFPLAPSSKSTSGGTAALGCLVKDYFPEPVTVSWNSGALTSGVHTFPAVLQSSGLYSLSSVVTVPSSSLGTQTYICNVNHKPSNTKVDKRV

SEQ ID NO: 42 - protein, 221 aa, Artificial Sequence
  Synthetic polypeptide representing artificial human antibody VH chain
QVQLVESGGGVVQPGRSLRLSCAASGFTFSSYGMHWVRQAPGKGLEWVAVISYDGSNKYYADSVKGRFTISRDNSKNTLYLQMNSLRAEDTAVYYCAKDQIVLEMATSPFDYWGQGTLVTVSSASTKGPSVFPLAPCSRSTSESTAALGCLVKDYFPEPVTVSWNSGALTSGVHTFPAVLQSSGLYSLSSVVTVPSSNFGTQTYTCNVDHKPSNTKVDKTV

SEQ ID NO: 43 - protein, 223 aa, Artificial Sequence
  Synthetic polypeptide representing artificial human antibody VH chain
QVQLQESGPGLVKPSQTLSLTCTVSGGSISSGGYYWSWIRQHPGKGLEWIGYIYYSGSTYYNPSLKSRVTISVDTSKNQFSLKLSSVTAADTAVYYCARDLSCSSTSCHDAFDIWGQGTMVTVSSASTKGPSVFPLAPSSKSTSGGTAALGCLVKDYFPEPVTVSWNSGALTSGVHTFPAVLQSSGLYSLSSVVTVPSSSLGTQTYICNVNHKPSNTKVDKSE

SEQ ID NO: 44 - protein, 123 aa, Artificial Sequence
  Synthetic polypeptide representing artificial human antibody VH chain
QVQLVQSGAEVKKPGASVKVSCKASGYTFTGYYLHWVRQAPGQGLEWMGRINPNSGGTNYAQNFQGRVTMTRDTSISTAYMELSSLKSDDTAVFFCARGPNFHESIRDGFDIWGQGTMVTVSS

SEQ ID NO: 45 - protein, 118 aa, Artificial Sequence
  Synthetic polypeptide representing artificial human antibody VH chain
EVQLVESGGGLVQPGGSLRLSCAASGFTFSSYDFHWVRQPTGKGLEWVSAIGTAGDTLYLDSVKGRFTISRENAKNSLYLQMNSLRAGDTAVYYCARVNWNSDTFDSWGQGTLVTVSS

SEQ ID NO: 46 - protein, 229 aa, Artificial Sequence
  Synthetic polypeptide representing artificial human antibody VH chain
QVQLVESGGGVVQPGRSLRLSCAASGFTFRSYGMHWARQAPGRGLEWVAVISYDGSNSYYADSVKGRFTISRDNSKNTLYLEMNSLRADDTAVYYCARDPGRDPYLDLDYHYGMDVWGQGTTVTVSSASPTSPKVFPLSLCSTQPDGNVVIACLVQGFFPQEPLSVTWSESGQGVTARNFPPSQDASGDLYTTSSQLTLPATQCLAGKSVTCHVKHYTNPSQDVTVPCP

SEQ ID NO: 47 - protein, 221 aa, Artificial Sequence
  Synthetic polypeptide representing artificial human antibody VH chain
QVQLVESGGGLVEPGGSLRLSCAASGFTFSDYYMSWIRQAPGKRLEWISHMSSGGNRRHYADSVRGRFTISRDNAKNSLYLQMNSMRADDTAVYYCARDKRSGMTSDRRIDYWGQGTRVTVSSASTKGPSVFPLAPSSKSTSGGTAALGCLVKDYFPEPVTVSWNSGALTSGVHTFPAVLQSSGLYSLSSVVTVPSSSLGTQTYICNVNHKPSNTKVDKRV

SEQ ID NO: 48 - protein, 217 aa, Artificial Sequence
  Synthetic polypeptide representing artificial human antibody VH chain
VVQLGESGGGLVKPGGSLRLSCAASGFTFSSYHMNWVRQSPEKGLEWVSYISSSGTYIDYADSVRGRFTISRDNAKNSLYLQMNILRPDDTAVYYCSGGYYSSSHMDVWGKGTTVTVSSASTKGPSVFPLAPSSKSTSGGTAALGCLVKDYFPEPVTVSWNSGALTSGVHTFPAVLQSSGLYSLSSVVTVPSSSLGTQTYICNVNHKPSNTKVDKRV

SEQ ID NO: 49 - protein, 218 aa, Artificial Sequence
  Synthetic polypeptide representing artificial human antibody VH chain
QVQLVESGGGVVQPGRSLRLSCAASGFTFSSYAMHWVRQAPGKGLEWVAVISYDGSNKYYADSLKGRFTISRDNSKDTLYLQVNSLRPEDTAVYYCARVNIAAAGTLDYWGQGTLVTVSSASTKGPSVFPLAPSSKSTSGGTAALGCLVKDYFPEPVTVSWNSGALTSGVHTFPAVLQSSGLYSLSSVVTVPSSSLGTQTYICNVNHKPSNTKVDKNE

SEQ ID NO: 50 - protein, 226 aa, Artificial Sequence
  Synthetic polypeptide representing artificial human antibody VH chain
EVQLVESGGGLVEPGRSLRLSCAASGFTLEEFAMHWVRQVPGKGLEWVSAISWNSGSIAYADSVKGRFTISRDNAKNSLYLQMDSLRAEDTALYYCVKDMGPAGTASAYHYHNGMDVWGQGTTVTVSSASTKGPSVFPLAPSSKSTSGGTAALGCLVKDYFPEPVTVSWNSGALTSGVHTFPAVLQSSGLYSLSSVVTVPSSSLGTQTYICNVNHKPSNTKVDKRE

SEQ ID NO: 51 - protein, 216 aa, Artificial Sequence
  Synthetic polypeptide representing artificial human antibody VH chain
QVQLQESGPGLVKPSETLSLTCTVSGGSISDYYWSWIRQPPGKELEWIGYIYYSGSTNYNPSLKSRVTISVDTSKNQFSLKLSSVTAADTAVYYCARLTTSTSALSYWGQGTLVTVSSASTKGPSVFPLAPSSKSTSGGTAALGCLVKDYFPEPVTVSWNSGALTSGVHTFPAVLQSSGLYSLSSVVTVPSSSLGTQTYICNVNHKPSNTKVDKSE

SEQ ID NO: 52 - protein, 221 aa, Artificial Sequence
  Synthetic polypeptide representing artificial human antibody VH chain
PVQLVQSGAEVKKPGSSVKVSCKASGGTFSSYAISWVRQAPGQGLEWMGGIIPIFGTANYAQKFQGRVTITADESTSTAYMELSSLRSEDTAVYYCARENWNSAGTTEWFDPWGQGTLVTVSSASTKGPSVFPLAPSSKSTSGGTAALGCLVKDYFPEPVTVSWNSGALTSGVHTFPAVLQSSGLYSLSSVVTVPSSSLGTQTYICNVNHKPSNTKVDKRV

SEQ ID NO: 53 - protein, 117 aa, Artificial Sequence
  Synthetic polypeptide representing artificial human antibody VH chain
QVQLVQSGAEVKKPGASVKVSCKASGYTFSSYGISWVRQAPGQGLEWMGWINGYNGNTNYAQKLQGRVTMTTDTSTSTAYMDLRSLRSDDTAVYYCARDTLQKGDYWGQGTLVTVSS

SEQ ID NO: 54 - protein, 224 aa, Artificial Sequence
  Synthetic polypeptide representing artificial human antibody VH chain
VVQLVESGGGLVQPGGSLRLSCAASGFTFRSYEMNWVRQAPGKGLEWVSYITSSGDTIYHADSVKGRFTISRDNTKNSLYLQMTGLRTEDTAVYYCARASRVLESKSWHGDAFDVWGRGTRVIVSSASTKGPSVFPLAPSSKSTSGGTAALGCLVKDYFPEPVTVSWNSGALTSGVHTFPAVLQSSGLYSLSSVVTVPSSSLGTQTYICNVNHKPSNTKVDKKV

SEQ ID NO: 55 - protein, 218 aa, Artificial Sequence
  Synthetic polypeptide representing artificial human antibody VH chain
QVQLVQSGAEVKKPGSSVKVSCKASGGTFSSYAISWVRQAPGQGLEWMGGIIPIFGTTNYAQKFQGRVTITADESTSTAYMELSSLRSEDTAVYYCARGLGGSGYYFDYWGQGTLVTVSSASTKGPSVFPLAPSSKSTSGGTAALGCLVKDYFPEPVTVSWNSGALTSGVHTFPAVLQSSGLYSLSSVVTVPSSSLGTQTYICNVNHKPSNTKVDKNE

SEQ ID NO: 56 - protein, 124 aa, Artificial Sequence
  Synthetic polypeptide representing artificial human antibody VH chain
EVQLVQSGAEVKKPGESLKISCRGSGDSFNKYFIGWVRQVPGKALEWMGIIYPGDSDTRYSPSFQGQVTISADKSINIAYLQWTSLKASDTAMYYCARQAFCGANCWSGAYDIWGQGTMVTVSS

SEQ ID NO: 57 - protein, 224 aa, Artificial Sequence
  Synthetic polypeptide representing artificial human antibody VH chain
QVQLVESGGGVVQPGRSLRLSCAASGFTFSTYGMNWVRQAPGKGLEWVAVTWYEGTNEEYADSVKGRFTISRDNSKNTVYLQMNSLRVDDTAVYYCVRRGATVFQGKIIKGYMDVWGKGTTVTVSSASTKGPSVFPLAPSSKSTSGGTAALGCLVKDYFPEPVTVSWNSGALTSGVHTFPAVLQSSGLYSLSSVVTVPSSSLGTQTYICNVNHKPSNTKVDKRE

SEQ ID NO: 58 - protein, 215 aa, Artificial Sequence
  Synthetic polypeptide representing artificial human antibody VH chain
VVQLLESGGGLVQPGGSLRLSCTASGFAFSSYAMTWVRQAPGKGLEWVSVMSGSGAGTYYADAVKGRFTISRDNSKNTLYLQMESLRVEDTAVYYCAKVKGGSNDYWGQGTLVTVSSASTKGPSVFPLAPSSKSTSGGTAALGCLVKDYFPEPVTVSWNSGALTSGVHTFPAVLQSSGLYSLSSVVTVPSSSLGTQTYICNVNHKPSNTKVDKNE

SEQ ID NO: 59 - protein, 218 aa, Artificial Sequence
  Synthetic polypeptide representing artificial human antibody VH chain
QVQLVESGGGVVQPGRSLRLSCAASGFTFSNHAMHWVRQAPGKGLEWVAVISYDGGTKYYADSVKGRFTISRDKSKNTLYLQMNSLRPEDTALYYCARHLYGDFYYLDYWGQGTLVTVSSASTKGPSVFPLAPSSKSTSGGTAALGCLVKDYFPEPVTVSWNSGALTSGVHTFPAVLQSSGLYSLSSVVTVPSSSLGTQTYICNVNHKPSNTKVDKRG

SEQ ID NO: 60 - protein, 218 aa, Artificial Sequence
  Synthetic polypeptide representing artificial human antibody VH chain
QVQLVESGGGVVRPGRSLRLSCAASGFTFSSHGMHWVRQAPGKGLEWVAVIWYDGSTKYYTDSVKGRFTISRDNSKNTLFLQLNSLRAEDTAVYYCARDHRTGSYYPDYWGQGTLVTVSSTSTKGPSVFPLAPSSKSTSGGTAALGCLVKDYFPEPVTVSWNSGALTSGVHTFPAVLQSSGLYSLSSVVTVPSSSLGTQTYICNVNHKPSNTKVDKRV

SEQ ID NO: 61 - protein, 221 aa, Artificial Sequence
  Synthetic polypeptide representing artificial human antibody VH chain
QVQLQESGPGLVKPSETLSLTCTVSGGSVDNVDSYWSWIRQPPGKGLEWIAYIYFTGSTNYNPSLKSRVTISIDTSKNQFSLKVNAVTAADTAVYYCARGVRQQQVRKWFDPWGRGTLVTVSSASTKGPSVFPLAPSSKSTSGGTAALGCLVKDYFPEPVTVSWNSGALTSGVHTFPAVLQSSGLYSLSSVVTVPSSSLGTQTYICNVNHKPSNTKVDKNE

SEQ ID NO: 62 - protein, 223 aa, Artificial Sequence
  Synthetic polypeptide representing artificial human antibody VH chain
PVQLVQSGAEVKKPGESLKISCKGSGYSFTTYWIGWVRQMPGKGLEWMGIIYPGDSDTRYSPSFQGQVTISADKSISTAYLQWNSLKASDTAMYYCAMDNSGSGGVDYWGQGTLVTVSSGSASAPTLFPLVSCENSPSDTSSVAVGCLAQDFLPDSITFSWKYKNNSDISSTRGFPSVLRGGKYAATSQVLLPSKDVMQGTDEHVVCKVQHPNGNKEKNVPLP

SEQ ID NO: 63 - protein, 218 aa, Artificial Sequence
  Synthetic polypeptide representing artificial human antibody VH chain
QVQLQESGPGLVKPSQTLPLTCTVSGDSISSGSYYWSWIRQPAGKGLEWIGRIYTSGSTKYNPSLKSRATISIDTSKNQFSLKLSSVTAADTAVYYCARDSYHYYGMDVWGQGTTVTVSSASTKGPSVFPLAPSSKSTSGGTAALGCLVKDYFPEPVTVSWNSGALTSGVHTFPAVLQSSGLYSLSSVVTVPSSSLGTQTYICNVNHKPSNTKVDKSE

SEQ ID NO: 64 - protein, 224 aa, Artificial Sequence
  Synthetic polypeptide representing artificial human antibody VH chain
QVQLQQSGPGLVKPSQTLSLTCAISGDSVSSNSAAWHWIRQSPSRGLEWLGRTHYRSKWYNEYAVSVKSRITINPDISKNQFSLQLSSVTPEDTAVYYCARETVYISTYYYGLDVWGQGTTVTVSSASTKGPSVFPLAPSSKSTSGGTAALGCLVKDYFPEPVTVSWNSGALTSGVHTFPAVLQSSGLYSLSSVVTVPSSSLGTQTYICNVNHKPSNTKVDKKV

SEQ ID NO: 65 - protein, 218 aa, Artificial Sequence
  Synthetic polypeptide representing artificial human antibody VH chain
PVQLIQSGAEVRKPGASVKVSCKVSGYTLSELSLHWVRQAPGKGLEWMGTFDPEDGETVYAQKFQGRVTVTEDTSTDTAYIDLSSLKSEDTAVYYCATDGPLHTSGLDYWGQGTLVTVSSASTKGPSVFPLAPCSRSTSESTAALGCLVKDYFPEPVTVSWNSGALTSGVHTFPAVLQSSGLYSLSSVVTVPSSSLGTQTYICNVNHKPSNTKVDKRV

SEQ ID NO: 66 - protein, 218 aa, Artificial Sequence
  Synthetic polypeptide representing artificial human antibody VH chain
VVQLVESGGGLVKPGGSLRLSCAASGFTFSSYSMNWVRQAPGKGLEWVSSISSSSSYIYYADSVKGRFTISRDNAKNSLYLQMNSLRAEDTAVYYCACLGAEANDAFDIWGQGTMVTVSSASTKGPSVFPLAPSSKSTSGGTAALGCLVKDYFPEPVTVSWNSGALTSGVHTFPAVLQSSGLYSLSSVVTVPSSSLGTQTYICNVNHKPSNTKVDKRV

SEQ ID NO: 67 - protein, 212 aa, Artificial Sequence
  Synthetic polypeptide representing artificial human antibody VH chain
EVQLLESGGGLVQPGGSLRLSCAASGFTFSNYAMNWVRQAPGKGLDWVSAISGSGGSTYYADSVKGRFTISRDISKNTLYLQMNSLRAEDTAVYYCAKVPGDYWGQGTLVTVSSASTKGPSVFPLAPSSKSTSGGTAALGCLVKDYFPEPVTVSWNSGALTSGVHTFPAVLQSSGLYSLSSVVTVPSSSLGTQTYICNVNHKPSNTKVDKNE

SEQ ID NO: 68 - protein, 220 aa, Artificial Sequence
  Synthetic polypeptide representing artificial human antibody VH chain
QVKLVQSGAEVKKPGSSVKVSCKTSGGPFSSYTITWVRQAPGQGPEWMGRITPIFNITNYAQNFQGRMTMTADKSTTTAYMELSGLKSEDTAVYYCARAGLSTSWPSWFDPWGQGTLVTVSSASTKGPSVFPLAPSSKSTSGGTAALGCLVKDYFPEPVTVSWNSGALTSGVHTFPAVLQSSGLYSLSSVVTVPSSSLGTQTYICNVNHKPSNTKVDKKV

SEQ ID NO: 69 - protein, 220 aa, Artificial Sequence
  Synthetic polypeptide representing artificial human antibody VH chain
QVQLQESGPGLVKPSQTLSLTCTVSGGSVNTGTSYWTWVRQRPGKGLEWIGFIYYSGSTYYNPALESRLTISLDTSQNQFSLKLTSVTAADTAVYFCARNDISFKQSAIDVWGQGTTVTVSSASTKGPSVFPLAPSSKSTSGGTAALGCLVKDYFPEPVTVSWNSGALTSGVHTFPAVLQSSGLYSLSSVVTVPSSSLGTQTYICNVNHKPSNTKVDKRV

SEQ ID NO: 70 - protein, 222 aa, Artificial Sequence
  Synthetic polypeptide representing artificial human antibody VH chain
QVHLAESGGGVVQTGGSLRLSCAVSGFHFGSHGMTWVRQAPGKGLEWLSFITYDGQIKYYGGSVKGRFNISRDNSKNTLHLHMNGLRVEDTAVYYCAKTKTMGVGGEYFGLDVWGLGTTVIVSSASTKGPSVFPLAPSSKSTSGGTAALGCLVKDYFPESVTVSWNSGALTSGVHTFPAVLQSSGLYSLSSVVTVPSSSLGTQTYICNVNHKPSNTKVDKKV

SEQ ID NO: 71 - protein, 222 aa, Artificial Sequence
  Synthetic polypeptide representing artificial human antibody VH chain
PLQLHESGPGLAKPSETLSLTCTLSGGSITTGSYYWAWIRQAPGKALEWIGTIYYSGTTYYNSSLNNRLTISVDTSKNQLSLKLVSVAAADTAIYYCARHKALWFGEAGAFDIWGQGTMVTVSSASTKGPSVFPLAPSSKSTSGGTAALGCLVKDYFPEPVTVSWNSGALTSGVHTFPAVLQSSGLYSLSSVVTVPSSSLGTQTYICNVNHKPSNTKVDKKV

SEQ ID NO: 72 - protein, 223 aa, Artificial Sequence
  Synthetic polypeptide representing artificial human antibody VH chain
EVQLVESGGGLVQPGRSLRLSCAASGFTFDDYAMHWVRQAPGKGLEWVSGISWNSGSIGYADSVKGRFTISRDNAKNSLYLQMNSLRAEDTALYYCAKDLLGFRDQRNYYGMDVWGQGTTVTVSSASTKGPSVFPLAPSSKSTSGGTAALGCLVKDYFPEPVTVSWNSGALTSGVHTFPAVLQSSGLYSLSSVVTVPSSSLGTQTYICNVNHKPSNTKVDKRV

SEQ ID NO: 73 - protein, 119 aa, Artificial Sequence
  Synthetic polypeptide representing artificial human antibody VH chain
QVQLQESGPGLVKPSETLSLSCTVSGASMNNYYWSWIRQSAGKGLEWIGRIYSSGDTDYNPSLKTRVTMSIDTSKNQFSLNLDSVTAADTATYYCARSFYDTLFYFENWGQGTLVTVSS

SEQ ID NO: 74 - protein, 218 aa, Artificial Sequence
  Synthetic polypeptide representing artificial human antibody VH chain
QITLKESGPTLVKPTQTLTLTCTFSGFSLTTTDVGVGWIRQPPGKALEWLTIIYWDDDERYSPSLKSRLTITKDTSKNQVVLSMTNMDPVDTATYYCARVYSTKWDFDYWGQGTLVTVSSASTKGPSVFPLAPSSKSTSGGTAALGCLVKDYFPEPVTVSWNSGALTSGVHTFPAVLQSSGLYSLSSVVTVPSSSLGTQTYICNVNHKPSNTKVDKRV

SEQ ID NO: 75 - protein, 216 aa, Artificial Sequence
  Synthetic polypeptide representing artificial human antibody VH chain
VVQLVESGGGLVQPGGSLRLSCAASGFTFSSYSMNWVRQAPGKGLEWLSYVSSSGSTMYYADSVKGRFTISRDTAKNSLFLQMNSLRAEDTAVYYCAKGGPLRPFDIWGQGTLVTVSSASTKGPSVFPLAPSSKSTSGGTAALGCLVKDYFPEPVTVSWNSGALTSGVHTFPAVLQSSGLYSLSSVVTVPSSSLGTQTYICNVNHKPSNTKVDKKV

SEQ ID NO: 76 - protein, 226 aa, Artificial Sequence
  Synthetic polypeptide representing artificial human antibody VH chain
AVQLVQSGAEVKKPGESLKISCRGSGYNFISHWISWVRQMPGKGLEWQWLGRIDPSDSYTNYSPSFRGHVTISVDKSVNTAYLQWNSLKASDTAMYYCARLSRDGYTIEHFDYWGQGTLVTVSSASPTSPKVFPLSLDSTPQDGNVVVACLVQGFFPQEPLSVTWSESGQNVTARNFPPSQDASGDLYTTSSQLTLPATQCPDGKSVTCHVKHYTNPSQDVTVPCP

SEQ ID NO: 77 - protein, 224 aa, Artificial Sequence
  Synthetic polypeptide representing artificial human antibody VH chain
EVQLVQSGAEVKKPGESLKISCKGSGYSFTSFWIGWVRQMPGKGLEWMGIIFPADSDTRYSPSFQGQVIISVDKSISTAYLQWSSLKASDTAMYYCARRGVSGGSAWTYYNFFDPWGQGTLVTVASASTKGPSVFPLAPSSKSTSGGTAALGCLVKDYFPEPVTVSWNSGALTSGVHTFPAVLQSSGLYSLSSVVTVPSSSLGTQTYICNVNHKPSNTKVDKKV

SEQ ID NO: 78 - protein, 222 aa, Artificial Sequence
  Synthetic polypeptide representing artificial human antibody VH chain
PVQLQESGPGLVKPSETLSLTCTVSGGSIDSYYWSWLRQPPGRGLEWIGYIFYSGITNYSPSLKSRVTISVDTSKNQFSLKLNSVTAADTAVYYCARELPVIGRRTFDIWGQGTMVTVSSASPTSPKVFPLSLCSTQPDGNVVIACLVQGFFPQEPLSVTWSESGQGVTARNFPPSQDASGDLYTTSSQLTLPATQCLAGKSVTCHVKHYTNPSQDVTVPCP

SEQ ID NO: 79 - protein, 227 aa, Artificial Sequence
  Synthetic polypeptide representing artificial human antibody VH chain
PVHLVQSGAEVKKPGSSVKVSCKLSGGIFSYFAIIWVRQAPGQGLEWMGTIIPIFGTSNYAEKFQDRVAIVADEATSTVYMEVNSLRSEDTAIYFCARDSEVEKSDGYMASTAEYFQLWGQGTLVTVSSASTKGPSVFPLAPSSKSTSGGTAALGCLVKDYFPEPVTVSWNSGALTSGVHTFPAVLQSSGLYSLSSVVTVPSSSLGTQTYICNVNHKPSNTKVDKKV

SEQ ID NO: 80 - protein, 221 aa, Artificial Sequence
  Synthetic polypeptide representing artificial human antibody VH chain
SAMHLVESGGAVVQPGESLRLSCSAFEFSFQYFSMFWVRQAPTKGLELVAQITWDGSIINYADSVKGRFTISRDNSKNSLYLQMTSLRSDDTAVYYCVKAGVPWEVQRWFDPWGQGTPVTVSSASTKGPSVFPLAPCSRSTSESTAALGCLVKDYFPEPVTVSWNSGALTSGVHTFPAVLQSSGLYSLSSVVTVPSSNFGTQTYTCNVDHKPSNTKVDKTV

SEQ ID NO: 81 - protein, 222 aa, Artificial Sequence
  Synthetic polypeptide representing artificial human antibody VH chain
QVHLVQSGAEVKRPGASVKVSCKGSGYTLNNDVAFSWVRQAPGQGPEWLGWINAYQGVTNISPNFRARVTMTTDTSTNTIYMDLQNLRSDDTAIYYCARDRQGLGRMDVWGQGTTVIVSSASPTSPKVFPLSLCSTQPDGNVVIACLVQGFFPQEPLSVTWSESGQGVTARNFPPSQDASGDLYTTSSQLTLPATQCLAGKSVTCHVKHYTNPSQDVTVPCP

SEQ ID NO: 82 - protein, 217 aa, Artificial Sequence
  Synthetic polypeptide representing artificial human antibody VH chain
VVQLVESGGGLVQPGGSLRLSCAASGFRFNYYWMSWVRQAPGKGLEWVANIKEDGSEKYYVDSVKGRFTISRDNAKNSLYLEMNSLRVEDTAVYYCARELGANYYFAYWGQGALVTVSSASTKGPSVFPLAPSSKSTSGGTAALGCLVKDYFPEPVTVSWNSGALTSGVHTFPAVLQSSGLYSLSSVVTVPSSSLGTQTYICNVNHKPSNTKVDKRV

SEQ ID NO: 83 - protein, 221 aa, Artificial Sequence
  Synthetic polypeptide representing artificial human antibody VH chain
QVQLQESGPGLVKPSQTLSLTCIVSGGSISGDKNFWSWVRQHPEKGLEWLGYISYNGNTYYNPSLISRIIISLDTPKNLFSLRLSSVTVADTAIYYCAREVDIRGDSDAFDIWGRGTVVTVSSASTKGPSVFPLAPCSRSTSESTAALGCLVKDYFPEPVTVSWNSGALTSGVHTFPAVLQSSGLYSLSSVVTVTSSNFGTQTYTCNVDHKPSNTKVDKTV

SEQ ID NO: 84 - protein, 218 aa, Artificial Sequence
  Synthetic polypeptide representing artificial human antibody VH chain
QVRLVESGGGLVQPGGFLRLSCAASGFTFSDYEMNWVRQAPGKGLEWISHIGSSGTYADSVKGRFTISRDNAKNSLYLQMSSLRAEDAGVYYCATTRNSAFLNWGQGTLVTVSSGSASAPTLFPLVSCENSPSDTSSVAVGCLAQDFLPDSITFSWKYKNNSDISSTRGFPSVLRGGKYAATSQVLLPSKDVMQGTDEHVVCKVQHPNGNKEKNVPLP

SEQ ID NO: 85 - protein, 219 aa, Artificial Sequence
  Synthetic polypeptide representing artificial human antibody VH chain
EVQLVESGGGLVQPGGSLRLSCAASGFPPRSFAMSWVRQAPGKGLEWVSSISGLGNSIYYAESVKGRFITSRDNSKSTVFLLMNSLRAEDTAVYYCAKSAFGGVPDGFDIWGQGTMVTVSSASTKGPSVFPLAPCSRSTSESTAALGCLVKDYFPEPVTVSWNSGALTSGVHTFPAVLQSSGLYSLSSVVTVPSSSLGTQTYICNVDHKPSNTKVDKTV

SEQ ID NO: 86 - protein, 212 aa, Artificial Sequence
  Synthetic polypeptide representing artificial human antibody VH chain
PVQLVESGGGVVQPGRSLRLSCAASGFTFSNYGMHWVRQAPGKGLEWVAVISDDGNDKDNADSVKGRFTISRDNSKNTLYLRMNSLRREDTAVYYCARDGFDYWGQGTLVTVSSASTKGPSVFPLAPSSKSTSGGTAALGCLVKDYFPEPVTVSWNSGALTSGVHTFPAVLQSSGLYSLSSVVTVPSSSLGTQTYICNVNHKPSNTKVDKNV

SEQ ID NO: 87 - protein, 120 aa, Artificial Sequence
  Synthetic polypeptide representing artificial human antibody VH chain
EVQLVESGGVVVQPGGSLRLSCAASGFTFDDYTMHWVRQAPGKGLEWVSLISWDGGSTYYADSVKGRFTISRDNSKNSLYLQMNSLRTEDTALYYCAKAGYSFTTAPDYWGQGTLVTVSS

SEQ ID NO: 88 - protein, 219 aa, Artificial Sequence
  Synthetic polypeptide representing artificial human antibody VH chain
PVQLVQSGAEVKKPGASVKVSCKASGDTFPNYVISWVRQAPGQGLEWVGCINTNNGKTNYVQKLQGRVILTTDTSTNTANMELRSLRFDDTAVYYCARERGQVRSYGMDVWGQGTAVTVSSASTKGPSVFPLAPCSRSTSESTAALGCLVKDYFPEPVTVSWNSGALTSGVHTFPAVLQSSGLYSLSSVVTVPSSSLGTKTYTCNVDHKPSNTKVDKRV

SEQ ID NO: 89 - protein, 228 aa, Artificial Sequence
  Synthetic polypeptide representing artificial human antibody VH chain
EVQLVESGGGLVQPGRSLRLSCAASGFTFDDYAMHWVRQPPGRGLEWVSGIDWSGKTTEYAQSVKGRFTISRDNAKNSLYLQMNSLRVEDTALYFCVKIGGDGTAYAWTFRHFDSWGQGTRVTVSSASPTSPKVFPLSLCSTQPDGNVVIACLVQGFFPQEPLSVTWSESGQGVTARNFPPSQDASGDLYTTSSQLTLPATQCLAGKSVTCHVKHYTNPSQDVTVPCP

SEQ ID NO: 90 - protein, 218 aa, Artificial Sequence
  Synthetic polypeptide representing artificial human antibody VH chain
EVQLLESGGGLVQPGGSLRLSCAASGFTFSSYAMSWVRQAPGKGLEWVSAISGSGGSTYYADSVKGRFTISRDNSKNTLYLQMNSLRAEDTAVYYCARGLGGDWNYLAYWGQGTLVTVSSASTKGPSVFPLAPCSRSTSGGTAALGCLVKDYFPEPVTVSWNSGALTSGVHTFPAVLQSSGLYSLSSVVTVPSSSLGTQTYTCNVNHKPSNTKVDKRV

SEQ ID NO: 91 - protein, 226 aa, Artificial Sequence
  Synthetic polypeptide representing artificial human antibody VH chain
QVQLVESGGGVVQPGRSLRLSCAASGFTFSNYDMHWVRQAPGKGLEWVTVVSYDGTNKYYAESVQGRFTISRDNSKNTLYLQMNSLRTEDTAVYYCAKEGGWGNTVTTSYYYYGMDVWGQGTTVTVSSASTKGPSVFPLAPSSKSTSGGTAALGCLVKDYFPEPVTVSWNSGALTSGVHTFPAVLQSSGLYSLSSVVTVPSSSLGTQTYICNVNHKPSNTKVDKRV

SEQ ID NO: 92 - protein, 219 aa, Artificial Sequence
  Synthetic polypeptide representing artificial human antibody VH chain
EVQLVESGGGLVRPGGSLRLSCVGSGFTFSPYSINWVRQAPGKGLEWVSSITSTSSYLDYADSVKGRFTISRDNAKNSVYLQMNSLRVEDTAVYYCTRDGGYFATGEFDYWGQGTMVTVSSASTKGPSVFPLAPSSKSTSGGTAALGCLVKDYFPEPVTVSWNSGALTSGVHTFPAVLQSSGLYSLSSVVTVPSSSLGTQTYICNVNHKPSNTKVDKRA

SEQ ID NO: 93 - protein, 222 aa, Artificial Sequence
  Synthetic polypeptide representing artificial human antibody VH chain
PVQLQESGPGLVKPSQTLSLTCTVSGGSITSGSYFWSWIRQPAGEGLEWIGRIYTSGSTNYNPSLKSRVTISADTSKNHFSLELSSVTAADTAMYFCARERFGQGALDYWGQGTLVTVSSASPTSPKVFPLSLDSTPQDGNVVVACLVQGFFPQEPLSVTWSESGQNVTARNFPPSQDASGDLYTTSSQLTLPATQCPDGKSVTCHVKHYTNSSQDVTVPCP

SEQ ID NO: 94 - protein, 221 aa, Artificial Sequence
  Synthetic polypeptide representing artificial human antibody VH chain
QLHLQESGPGLVKPSETLSLTCTVSGGSVSSSSYYWGWVRQPPGKGLEWIGHVYYSGRTYYNPSLKSRATISLDTSKNQFSLKLSSLTATDTAVYYCATIVAAYSYGFEFDPWGQGILVIVSSASTKGPSVFPLAPSSKSTSGGTAALGCLVKDYFPEPVTVSWNSGALTSGVHTFPAVLQSSGLYSLSSVVTVPSSSLGTQTYICNVNHKPSNTKVDKRA

SEQ ID NO: 95 - protein, 226 aa, Artificial Sequence; identical to SEQ ID NO: 91
  Synthetic polypeptide representing artificial human antibody VH chain

SEQ ID NO: 96 - protein, 121 aa, Artificial Sequence
  Synthetic polypeptide representing artificial human antibody VH chain
VQLVQSGAEVRKPGESLTISCKTSGYAFIGNWIGWVRQRPGKGLEWIGMIYPVDSDTRYSPSFQGQVTISVDKSIRTAYLQWNSLRASDTATYYCARQGFEALVIRGFDYWGQGTVVTVSS

SEQ ID NO: 97 - protein, 222 aa, Artificial Sequence
  Synthetic polypeptide representing artificial human antibody VH chain
EGQLLESGGGLVQPGGSLRLSCEASGFTFSFSSYAMSWVRQAPGRGLEWVSVTGGSGYTKYYADSVKGRFTVSRDNSKNTLYLQMNSLRAEDTALYYCARRSTSSPSFSTLDVWGRGATVIVSSASTKGPSVFPLAPSSKSTSGGTAALGCLVKDYFPEPVTVSWNSGALTSGVHTFPAVLQSSGLYSLSSVVTVPSSSLGTQTYICNVNHKPSNTKVDKSE

SEQ ID NO: 98 - protein, 215 aa, Artificial Sequence
  Synthetic polypeptide representing artificial human antibody VH chain
VVQLVESGGGLVQPGGSLRLSCAASGFTFNNYEMNWVRQAPGKGLEWVSYISSSGSTIYYADSVKGRFTISRDNAKNSLYLQMNSLRAEDTAVYYCARQMVTTRGYWGQGTLVTVSSASTKGPSVFPLAPSSKSTSGGTAALGCLVKDYFPEPVTVSWNSGALTSGVHTFPAVLQSSGLYSLSSVVTVPSSSLGTQTYICNVNHKPSNTKVDKNV

SEQ ID NO: 99 - protein, 221 aa, Artificial Sequence
  Synthetic polypeptide representing artificial human antibody VH chain
EVQLVESGGGLVQPGGSLRLSCAASGFTFSSNWMSWVRQAPGKGLEWVANIKEDGSEKYYVDSVKGRFTIFRDNAKNSLYLQMNSLRAEDTAVYYCARVPSRYGRSRGAFDIWGQGTMVTVSSASTKGPSVFPLAPSSKSTSGGTAALGCLVKDYFPEPVTVSWNSGALTSGVHTFPAVLQSSGLYSLSSVVTVPSSSLGTQTYICNVNHKPSNTKVDKRV

SEQ ID NO: 100 - protein, 218 aa, Artificial Sequence
  Synthetic polypeptide representing artificial human antibody VH chain
QVQLQESGPGLVKPSQTLSLTCTVSGGSISSGGYYWSWIRQHPGKGLEWIGYIYYSGSTYYNPSLKSLVTISVDTSKNQFSLKLSSVTAADTAVYYCARNLYRLGWFDPWGQGTLVTVSSASTKGPSVFPLAPSSKSTSGGTAALGCLVKDYFPEPVTVSWNSGALTSGVHTFPAVLQSSGLYSLSSVVTVPSSSLGTQTYICNVNHKPSNTKVDKKV

SEQ ID NO: 101 - protein, 218 aa, Artificial Sequence
  Synthetic polypeptide representing artificial human antibody VH chain
QVQLVESGGGVVQPGRSLRLSCAASGFTFSSYGMHWVRQAPGKGLEWVAIISYDGSNKYYADSVKGRFTISRDKSKNTLYLQMNSLRAEDTAVYYCAKSKGNYRDAMDVWGQGTTVTVSSASTKGPSVFPLAPSSKSTSGGTAALGCLVKDYFPEPVTVSWNSGALTSGVHTFPAVLQSSGLYSLSSVVTVPSSSLGTQTYICNVNHKPSNTKVDKRV

SEQ ID NO: 102 - protein, 219 aa, Artificial Sequence
  Synthetic polypeptide representing artificial human antibody VH chain
QVLLVESGGGLVKPGGSLRLSCAASGFTFSDYYMSWIRQAPGKGLEWVSYIGSSTTAIYYADSVKGRFTISRDNARNSLYLQMNSLRAEDTAVYYCATSYTVTTFYGMDVWGQGTTVTVSSASTKGPSVFPLAPSSKSTSGGTAALGCLVKDYFPEPVTVSWNSGALTSGVHTFPAVLQSSGLYSLSSVVTVPSSSLGTQTYICNVNHKPSNTKVDKRV

SEQ ID NO: 103 - protein, 218 aa, Artificial Sequence
  Synthetic polypeptide representing artificial human antibody VH chain
QVQLQESGPGLVKPSQTLSLTCAVSGGSISSGGYPWSWIRQPPGKGLEWIGYISYSGSTDYNPSLKSRVTISLDTSSNQFSLNLSSLTAADTAVYYCARGAAFYYGMDVWGQGTTVTVSSASTKGPSVFPLAPSSKSTSGGTAALGCLVKDYFPEPVTVSWNSGALTSGVHTFPAVLQSSGLYSLSSVVTVPSSSLGTQTYICNVNHKPSNTKVDKRV

SEQ ID NO: 104 - protein, 219 aa, Artificial Sequence
  Synthetic polypeptide representing artificial human antibody VH chain
QVQLQESGPGLVKPSETLSLTCTVSGGSISIYYWSWIRQPPGKGLEWIGYIYYSGSTNYNPSLKSRVTISVDTSKNQFSLKLRSVTAADTAVYYCARDTYGDPRGDYFDYWGQGTLVTVSSASTKGPSVFPLAPSSKSTSGGTAALGCLVKDYFPEPVTVSWNSGALTSGVHTFPAVLQSSGLYSLSSVVTVPSSSLGTQTYICNVNHKPSNTKVDKKV

SEQ ID NO: 105 - protein, 123 aa, Artificial Sequence
  Synthetic polypeptide representing artificial human antibody VH chain
QVQLQESGPGLVKPSETLSLTCTVANSSISSYYWSWVRQPPGKALEWIGYISYSGSTNYNPSLKSRVTMSLDTPKSQFSLNLSSVTGADTAIYYCARLWGSGDWWPSLYFDSWGQGTLVTVSS

SEQ ID NO: 106 - protein, 218 aa, Artificial Sequence
  Synthetic polypeptide representing artificial human antibody VH chain
VVQLVESGGGLVQPGGSLRLSCAASGFTFNSYWMSWVRQAPGKGLEWVANIKQDGSEKYYVDSVKGRFTISRDNAKNSLYLQMNSLRAEDTAVYYCARIRRIAATSFDYWGQGTLVTVSSASTKGPSVFPLAPSSKSTSGGTAALGCLVKDYFPEPVTVSWNSGALTSGVHTFPAVLQSSGLYSLSSVVTVPSSSLGTQTYICNVNHKPSNTKVDKNV

SEQ ID NO: 107 - protein, 225 aa, Artificial Sequence
  Synthetic polypeptide representing artificial human antibody VH chain
EVQLVESGGGLVQPGRSLRLSCAASGFTFDDYAMHWVRQAPGKGLEWVSGISWNSGSIGYADSVKGRFTISRDNAKNSLYLQMNSLRAEDTALYYCAKIARRPPSFYDYMDVWGKGTTVTVSSASPTSPKVFPLSLCSTQPDGNVVIACLVQGFFPQEPLSVTWSESGQGVTARNFPPSQDASGDLYTTSSQLTLPATQCLAGKSVTCHVKHYTNPSQDVTVPCP

SEQ ID NO: 108 - protein, 225 aa, Artificial Sequence
  Synthetic polypeptide representing artificial human antibody VH chain
EVQLVQSGAEVKKPGESLKISCQGSGYRFNAYWIGWVRQIPGKGLEWMGIIYPGDSDTKYSPSFQGQVTISADKSISTAYLQWNGLEASDTAVYYCARSTSSSTSDFHYMDVWGKGTTVTISSASPTSPKVFPLSLCSTQPDGNVVIACLVQGFFPQEPLSVTWSESGQGVTARNFPPSQDASGDLYTTSSQLTLPATQCLAGKSVTCHVKHYTNPSQDVTVPCP

SEQ ID NO: 109 - protein, 218 aa, Artificial Sequence
  Synthetic polypeptide representing artificial human antibody VH chain
HVQLLQSGPGLVKPSQTLSLTCAISGDSVSSTSGAWNWIRQSPSRGLEWLGRTYYRSQWMNDYAESVRSRITINPDTSKNQFSLQLKSVTPEDTAVYYCTRGWAFTSSDWGQGTQVTVSSASTKGPSVFPLAPCSRSTSESTAALGCLVKDYFPEPVTVSWNSGALTSGVHTFPAVLQSSGLYSLSSVVTVPSSNFGTQTYTCNVDHKPSNTKVDKTV

SEQ ID NO: 110 - protein, 222 aa, Artificial Sequence
  Synthetic polypeptide representing artificial human antibody VH chain
HVHLQQSGPGLVTPSQTLSLTCAISGDSVSSNSAAWNWIRQSPSRGLEWLGRTYYRSKWYNDYAVSVKSRITFKADTSKNQFSLQLDSVTPDDTAVYYCAGGWALGYWGQGTLVTVSSGSASAPTLFPLVSCENSPSDTSSVAVGCLAQDFLPDSITFSWKYKNNSDISSTRGFPSVLRGGKYAATSQVLLPSKEVMQGTDEHVVCKVQHPNGNKEKNVPLP

SEQ ID NO: 111 - protein, 116 aa, Artificial Sequence
  Synthetic polypeptide representing artificial human antibody VH chain
PVQLQESGPGLVKPSETLSLTCTVSGGSISSYYWSWIRQPPGKGLEWIGYLFYSGSTNYNPSLKSRVTISVDTSKNQFSLKLGSVTAADTAVYYCARHRIFGLDVWGQGTTVTVSS

SEQ ID NO: 112 - protein, 230 aa, Artificial Sequence
  Synthetic polypeptide representing artificial human antibody VH chain
CAEVQLVQSGAEVKKPGESLKISCKGSGYSFTSYWIGWVRQMPGKGLEWMGIIYPGDSDTRYSPSFQGQVTISADKSISTAYLQWSSLKASDTAMYYCARRGPTDTWSGEVGYYFDYWGQGTLVTVSSASPTSPKVFPLSLCSTQPDGNVVIACLVQGFFPQEPLSVTWSESGQGVTARNFPPSQDASGDLYTTSSQLTLPATQCLAGKSVTCHVKHYTNPSQDVTVPCP

SEQ ID NO: 113 - protein, 223 aa, Artificial Sequence
  Synthetic polypeptide representing artificial human antibody VH chain
QCQVQLVESGGGVVQPGRSLRLSCAASGFTFSSYGMHWVRQAPGKGLEWVAVIWYDGSNKYYADSVKGRFTISRDNSKNTLYLQMNSLRAEDTAVYYCARDGKTLGYGGNSVDYWGQGTLVTVSSASTKGPSVFPLAPSSKSTSGGTAALGCLVKDYFPEPVTVSWNSGALTSGVHTFPAVLQSSGLYSLSSVVTVPSSSLGTQTYICNVNHKPSNTKVDKKV

SEQ ID NO: 114 - protein, 224 aa, Artificial Sequence
  Synthetic polypeptide representing artificial human antibody VH chain
EVQLVESGGGLVKPGGSLRLSCAVSGFTFRSYSMNWVRQAPGKGLEWVSSISSSSRYVDYADSVKGRFTISRDNAKNLLYLQMNFLRVEDTAVYYCARTETKWEDRGLWDYWGQGTLVTVSSASPTSPKVFPLSLCSTQPDGNVVIACLVQGFFPQEPLSVTWSESGQGVTARNFPPSQDASGDLYTTSSQLTLPATQCLAGKSVTCHVKHYTNPSQDVTVPCP

SEQ ID NO: 115 - protein, 215 aa, Artificial Sequence
  Synthetic polypeptide representing artificial human antibody VH chain
QVQLVQSGAEVKKPGSSVKVSCKTSGGTFSSYTISWVRQAPGQGPEWMGRIIPILNITNYAQKFQGRVTITADKSTSTTYMEMGSLRSEDTAVYFCARSFYGSGLQWGQGTLVTVSSASTKGPSVFPLAPSSKSTSGGTAALGCLVKDYFPEPVTVSWNSGALTSGVHTFPAVLQSSGLYSLSSVVTVPSSSLGTQTYICNVNHKPSNTKVDKRV

SEQ ID NO: 116 - protein, 218 aa, Artificial Sequence
  Synthetic polypeptide representing artificial human antibody VH chain
GVDLVESGGGLVKPGGSLRLSCAASGFSFSRYNINWVRQAPGKGLEWVSSISSTSNYIYYADSVKGRFTISRDNAKNSLYLQMNSLRAEDTAVYYCARAMGGYTYYLDDWGQGTLVTVSSASTKGPSVFPLAPSSKSTSGGTAALGCLVKDYFPEPVTVSWNSGALTSGVHTFPAVLQSSGLYSLSSVVTVPSSSLGTQTYICNVNHKPSNTKVDKKV

SEQ ID NO: 117 - protein, 222 aa, Artificial Sequence
  Synthetic polypeptide representing artificial human antibody VH chain
QVQLVESGGGVVQPGRSLRLSCAASGFTFTNYAIHWVRQAPDKGLEWVSVISYDGSDEYYADSVKGRFTISRDNSKNTVYLQMSSLRAEDTAVYRCARAGKDGYNFFYYGMDVWGQGTTVSVSSPSTKGPSVFPLAPSSKSTSGGTAALGCLVKDYFPEPVTVSWNSGALTSGVHTFPAVLQSSGLYSLSSVVTVPSSSLGTQTYICNVNHKPSNTKVDKKL

SEQ ID NO: 118 - protein, 220 aa, Artificial Sequence
  Synthetic polypeptide representing artificial human antibody VH chain
QVQLVESGGGVVQPGRSLRLSCAASGFSFSSFGMHWVRQAPGKGLEWVAVIWHDGSHKSHADSVKGRFTISRDNSKNTVYLQMNSLGAEDTAVYYCARGIMTTAISYYFDYWGQGTLVTVSSASTKGPSVFPLAPSSKSTSGGTAALGCLVKDYFPEPVTVSWNSGALTSGVHTFPAVLQSSGLYSLSSVVTVPSSSLGTQTYICNVNHKPSNTKVDKRV

SEQ ID NO: 119 - protein, 125 aa, Artificial Sequence
  Synthetic polypeptide representing artificial human antibody VH chain
EVQLLQSGGGLVQPGGSLRLSCAASGFTFSSYAVTWVRQAPGKGLEWVSTISGDGRSTYFADSVKGRFAIYRDNSKNTLSLLLNSLRAEDTAVYYCAKGERDLTDYGDPEYFQHWGQGTLVTVSS

SEQ ID NO: 120 - protein, 125 aa, Artificial Sequence
  Synthetic polypeptide representing artificial human antibody VH chain
QVQVVESGGGVVQPGRSLRLSCVASGFTFSSHGMHWVRQAPGKGLEWVAVISDDGKNKYYGDSVQGRFVISRDNSKNTIYLQMYDLRAEDTAVYYCAKDLRYCSARSSCFGIDFWGQGTLVTVSS

SEQ ID NO: 121 - protein, 214 aa, Artificial Sequence
  Synthetic polypeptide representing artificial human antibody VH chain
VVQLVESGGGLVQPGGSLRLSCAASGFSFSTYWMSWVRQAPGKGLEWVANIKQDGSEKHYVDSVKGRFTISRDNAKNSLYLQMNSLRAEDTAMYYCARRAYSFDYWGQGTLVTVSSASTKGPSVFPLAPSSKSTSGGTAALGCLVKDYFPEPVTVSWNSGALTSGVHTFPAVLQSSGLYSLSSVVTVPSSSLGTQTYICNVNHKPSNTKVDKSE

SEQ ID NO: 122 - protein, 223 aa, Artificial Sequence
  Synthetic polypeptide representing artificial human antibody VH chain
EVQLVESGGGLVQPGGSLRLSCAASGFTFNNYWMHWVRQAPGKGLVWVSRISSDGSTTASADSVKGRFTISRDNAKNTLFLQMNSLRAEDTAVYYCAREGAPDDYGDSGTAFDIWGQGTTVTVSSASTKGPSVFPLAPSSKSTSGGTAALGCLVKDYFPEPVTVSWNSGALTSGVHTFPAVLQSSGLYSLSSVVTVPSSSLGTQTYICNVNHKPSNTKVDKKV

SEQ ID NO: 123 - protein, 219 aa, Artificial Sequence
  Synthetic polypeptide representing artificial human antibody VH chain
EVHLVQSGGGLVKPGGSLRLSCAASGFTFSHGWMSWVRQAPGKGLEWVARIRSKTDGGTTDYAAPVNGRFTISRDISIETLYLQMDSLKTEDTAVYYCTTDHPYGDYSDNWGQGVLVTVSSASTKGPSVFPLAPSSKSTSGGTAALGCLVKDYFPEPVTVSWNSGALTSGVHTFPAVLQSSGLYSLSSVVTVPSSSLGTQTYICNVNHKPSNTKVDKSE

SEQ ID NO: 124 - protein, 218 aa, Artificial Sequence
  Synthetic polypeptide representing artificial human antibody VH chain
QVQLQESGPGLVKPSETLSLTCTVSGGSIRNDYWSWIRQSPGKGLEWIGYISDIGDTNYNPSFKSRISISLDTSKNQFSLKLNSVTAADTAVYYCAKELLGGFDYWGQGTLVAVSTASPTSPKVFPLSLCSTQPDGNVVIACLVQGFFPQEPLSVTWSESGQGVTARNFPPSQDASGDLYTTSSQLTLPATQCLAGKSVTCHVKHYTNPSQDVTVPCP

SEQ ID NO: 125 - protein, 218 aa, Artificial Sequence
  Synthetic polypeptide representing artificial human antibody VH chain
QVQLVQSGAEVKKPGSSVKVSCKASGGTFSSYAISWVRQAPGQGLEWMGGIIPIFGTANYAQKFQGRVTITADESTSTAYMELSSLRSEDTAVYYCARVFGSAAGAFDIWGQGTMVTVSSASTKGPSVFPLAPSSKSTSGGTAALGCLVKDYFPEPVTVSWNSGALTSGVHTFPAVLQSSGLYSLSSVVTVPSSSLGTQTYICNVNHKPSNTKVDKSE

SEQ ID NO: 126 - protein, 218 aa, Artificial Sequence
  Synthetic polypeptide representing artificial human antibody VH chain
PLQLHESGPGLVKPSETLSLTCSVSGGSISSSNYFWGWIRQSPGMGLEWIGSIYFSGKTHYNPSLKSRVTISVDTSKNHFSLKLSSVTAADTAVFFCARHDWRLYAFDYWGLGTLVTVSSASTKGPSVFPLAPSSKSTSGGTAALGCLVKDYFPEPVTVSWNSGALTSGVHTFPAVLQSSGLYSLSSVVTVPSSSLGTQTYICNVNHKPSNTKVDKSE

SEQ ID NO: 127 - protein, 220 aa, Artificial Sequence
  Synthetic polypeptide representing artificial human antibody VH chain
VVQLVESGGGLVQPGGSLRLSCAGSGFTFSDYWMHWVRQAPGKGLVWVSTINRDGSYTNHADSVKGRFTISRDNARSTLFLQMSSLRVEDTAVYYCAGGETSPDYWGQGTLVTVSSGSASAPTLFPLVSCENSPSDTSSVAVGCLAQDFLPDSITFSWKYKNNSDISSTRGFPSVLRGGKYAATSQVLLPSKDVMQGTDEHVVCKVQHPNGNKEKNVPLP

SEQ ID NO: 128 - protein, 221 aa, Artificial Sequence
  Synthetic polypeptide representing artificial human antibody VH chain
QLQLQESGPGLVKPSETLSLTCTVSDVSIISSFYYWGWIRQPPGKGLEWIGSVYYSGSTSYNPSLKSRVTISADTSKAHFSLNLRSVTAADTAVYYCVSRGPLGGAAAGPDYWGQGALVIVSSASTKGPSVFPLAPSSKSTSGGTAALGCLVKDYFPEPVTVSWNSGALTSGVHTFPAVLQSSGLYSLSSVVTVPSSSLGTQTYICNVNHKPSNTKVDKRV

SEQ ID NO: 129 - protein, 216 aa, Artificial Sequence
  Synthetic polypeptide representing artificial human antibody VH chain
QVRLQESGPGLVKPSQTLSLTCTVSGASVSSGSYYWAWVRQSAAKGLEWIGRVSPSGTNNYNTALKSRVTISLDTARNQFSLTVTSVTAEDTAIYYCARDVRGWFVPWGQGSLVTVSSASTKGPSVFPLAPSSKSTSGGTAALGCLVKDYFPEPVTVSWNSGALTSGVHTFPAVLQSSGLYSLSSVVTVPSSSLGTQTYICNVNHKPSNTKVDKSE

SEQ ID NO: 130 - protein, 224 aa, Artificial Sequence
  Synthetic polypeptide representing artificial human antibody VH chain
PVQLVQSGAVVKKPGSSVKVSCKASGGTFSGYGINWVRQAPGQGLEWMGRIIPIVGEANYAQKFQGRVTINADKSTSTATLEVRSLRSEDTAVYYCVRDRNIVSVPGAIPYGMDVWGQGTTVTVSSASTKGPSVFPLAPCSRSTSGGTAALGCLVKDYFPEPVTVSWNSGALTSGVHTFPAVLQSSGLYSLSSVVTVPSSSLGTQTYTCNVNHKPSNTKVDKRV

SEQ ID NO: 131 - protein, 116 aa, Artificial Sequence
  Synthetic polypeptide representing artificial human antibody VH chain
VVQLVESGGGLVQPGGSLRLSCAASGFTFSSYWMHWVRQAPGKGLVWVSRINSDGSSTSYADSVKGRFTISRDNAKNTLYLQMNSLRAEDTAVYYCARGSDTLDYWGQGTLVTVSS

SEQ ID NO: 132 - protein, 218 aa, Artificial Sequence
  Synthetic polypeptide representing artificial human antibody VH chain
QVQLQESGPGLLKPSQTLSLSCTVSGGSISSGDYYWSWIRQPPGKGLEWIGYIYYNGSTYYSSSLRSRLTISVDTSKNQFSLKLSSVTAADTAAYYCARVGLTFALFDPWGQGTLVTVSSASTKGPSVFPLAPCSRSTSESTAALGCLVKDYFPEPVTVSWNSGALTSGVHTFPAVLQSSGLYSLSSVVTVPSSSLGTKTYTCNVDHKPSNTKVDKRV

SEQ ID NO: 133 - protein, 222 aa, Artificial Sequence
  Synthetic polypeptide representing artificial human antibody VH chain
VVQLLESGGGLVQPGGSLRLSCAASGFTFSSYAINWVRQAPGKGLEWVSAISGSGGSTYYADSVKGRFTISRDNSKNTLYLQMNSLRAEDTAVYYCANSAGIQLWSSDNWFDPWGQGTLVTVSSASTKGPSVFPLAPSSKSTSGGTAALGCLVKDYFPEPVTVSWNSGALTSGVHTFPAVLQSSGLYSLSSVVTVPSSSLGTQTYICNVNHKPSNTKVDKSE

SEQ ID NO: 134 - protein, 219 aa, Artificial Sequence
  Synthetic polypeptide representing artificial human antibody VH chain
EVQLLESGGGLVQPGGSLRLSCAASGFTFSSYAMSWVRQAPGKGLEWVSAISASGRTTYYADSFKGRFTISRDNSKNTLYLQMSRLRGDDAAVYYCAKEGIELMILWGQGTLVTVSSTSPTSPKVFPLSLCSTQPDGNVVIACLVQGFFPQEPLSVTWSESGQGVTARNFPPSQDASGDLYTTSSQLTLPATQCLAGKSVTCHVKHYTNPSQDVTVPCP

SEQ ID NO: 135 - protein, 223 aa, Artificial Sequence
  Synthetic polypeptide representing artificial human antibody VH chain
VVQLVESGGALVQPGGSLRLSCAASGFTLSSYAMYWVRQAPGKGLEYVSAITANGGSTYYANSVKGRFTVSRDNSKKTVYLQLGSLRAEDTAVYYCARGITLTRGVSFDYWGQGTLVTVSPASPTSPKVFPLSLCSTQPDGNVVIACLVQGFFPQEPLSVTWSESGQGVTARNFPPSQDASGDLYTTSSQLTLPATQCLAGKSVTCHVKHYTNPSQDVTVPCP

SEQ ID NO: 136 - protein, 117 aa, Artificial Sequence
  Synthetic polypeptide representing artificial human antibody VH chain
PLQLQESGSGLVKPSQTLSLTCAVSGGSISSGGYSWSWIRQPPGKGLEWLGYIYHRGTSYYNPSLKSRVTISLDMSKNQLSLKLTSVTAADTAVYYCARDGGAFDIWGQGTLVTVSS

SEQ ID NO: 137 - protein, 221 aa, Artificial Sequence
  Synthetic polypeptide representing artificial human antibody VH chain
QVHLVESGGGVVQPGRSLRLSCAASGFTFSNSAMHWVRQAPGKGLDWVSVISFDGSNQYYADSVKGRFTISRDNSKNTLFLQMNSLRAEDTAVYYCARDRLFTAINSGYFDYWGQGTLVTVSSASTKGPSVFPLAPSSKSTSGGTAALGCLVKDYFPEPVTVSWNSGALTSGVHTFPAVLQSSGLYSLSSVVTVPSSSLGTQTYICNVNHKPSNTKVDKSE

SEQ ID NO: 138 - protein, 118 aa, Artificial Sequence
  Synthetic polypeptide representing artificial human antibody VH chain
QVQLVQPGGEVKKPGASVKISCKASGYTFTSHYMHWVRQAPGQGLEWMGMIDPSGGSRTYAQKFQGRVTMTRDTSTSTVYMELSSLRSDDTAVYYCAREGSYYGIGYWGQGTLVTVSS

SEQ ID NO: 139 - protein, 121 aa, Artificial Sequence
  Synthetic polypeptide representing artificial human antibody VH chain
EVQLVESGGVVVQPGGSLRLSCAASGFTFSAYWMHWVRQAPGKGLVWVSRINTDGSSTSYADSVKGRFTISRDNAKNSLYLQMNSLRAEDTAVYYCARDTDSGWLDSFDYWGQGTLVTVSS

SEQ ID NO: 140 - protein, 128 aa, Artificial Sequence
  Synthetic polypeptide representing artificial human antibody VH chain
QGQLVQSGAEVKKAGASVKVSCKVSGYSLTEISMHWVRQAPGKGLEWVGGFDPEGGETIYAQKFQGRVSMTWDTSIDLAYMELRSLSSDDTALYYCATDQGCDDGSCYVGHYYGMDVWGQGTKVTVSS

SEQ ID NO: 141 - protein, 216 aa, Artificial Sequence
  Synthetic polypeptide representing artificial human antibody VH chain
PLQLQESGPGLVKPSETLSLTCSVSGGSIRSSAPFWGWIRQPPGKGLEWIGNIYYNGDTSYSPSLENRVTLFVDTSKNQFSLNLTSVTAADTAVYYCGRIMTPSIDLWGQGKLVTVSSASPTSPKVFPLAPSSKSTSGGTAALGCLVKDYFPEPVTVSWNSGALTSGVHTFPAVLQSSGLYSLSSVVTVPSSSLGTQTYICNVNHKPSNTKVDKNE

SEQ ID NO: 142 - protein, 218 aa, Artificial Sequence
  Synthetic polypeptide representing artificial human antibody VH chain
QVQLVQSGAEVKKPGASVKVSCKASGYIFTTYVISWVRQAPGQGLEWMGWISAYTGNTNYPQKFQGRVTMTTDTATSTAYMELKSLRSDDTAVYYCAREGRGGGDFFDYWGQGTLVTVSSASTKGPSVFPLAPSSKSTSGGTAALGCLVKDYFPEPVTVSWNSGALTSGVHTFPAVLQSSGLYSLSSVVTVPSSSLGTQTYICNVNHKPSNTKVDKNV

SEQ ID NO: 143 - protein, 219 aa, Artificial Sequence
  Synthetic polypeptide representing artificial human antibody VH chain
VQLVESGGGLVQPGRSLRLSCAASGFTFDDYAMHWVRQAPGKGLEWVSGIIWNSGTTGYADSVKGRFTISRDNAKKSLYLQMNSLRTEDTALYYCAKDGDSLGDFSTFDIWGHGTMVTVSSASTKGPSVFPLAPSSKSTSGGTAALGCLVKDYFPEPVTVSWNSGALTSGVHTFPAVLQSSGLYSLSSVVTVPSSSLGTQTYICNVNHKPSNTKVDKNV

SEQ ID NO: 144 - protein, 217 aa, Artificial Sequence
  Synthetic polypeptide representing artificial human antibody VH chain
EVQLVESGGGLVQTGGSLRLSCSASGFTFNNYWMHWVRQAPGKGLLWLSRINTDGSRGHYDDSVQGRFTISRDNAKQTVYLQMDGLRAEDTAVYFCARDGYDFRAFDHWGQGVLVTVSSASTKGPSVFPLAPSSKSTSGGTAALGCLVKDYFPEPVTVSWNSGALTSGVHTFPAVLQSSGLYSLSSVVTVPSSSLGTQTYICNVNHKPSNTKVDKKV

SEQ ID NO: 145 - protein, 224 aa, Artificial Sequence
  Synthetic polypeptide representing artificial human antibody VH chain
QVQLLESGPGVVKPSETLSLTCSVSGDSVSSFYWTWIRQPPGKGPEWIGNIYHSGSTNFNPSLKSRVTISLDMSKNQFSLHLKSVTAADTAVYYCARARGGGFCSNMDCPAMFDYWGRGTLVTVSAASTKGPSVFPLAPSSKSTSGGTAALGCLVKDYFPEPVTVSWNSGALTSGVHTFPAVLQSSGLYSLSSVVTVPSSSLGTQTYICNVNHKPSNTKVDKSE

SEQ ID NO: 146 - protein, 121 aa, Artificial Sequence
  Synthetic polypeptide representing artificial human antibody VH chain
EVQLVESGGGSVKPGGSLRLSCVAGGYNFNDDRMSSMNWVRQAPGKGLEWVGRIKSKSDGGSTNYAAPVQGRFTISRDDSKNTLYLQMNSLKIEDTAVYYCTTIHDYGDHWGQGTLVTVSS

SEQ ID NO: 147 - protein, 214 aa, Artificial Sequence
  Synthetic polypeptide representing artificial human antibody VH chain
EVQLVESGGALVQPGGSLRISCAASGFTVSTNYMSWVRQAPGKELEWISVIYSGGTTYYAAPVKGRFTISRDDSKNTLYLQMNSLRVEDTAVYHCARGLLRSLDVWGQGTTVTVSSASTKGPSVFPLAPCSRSTSESTAALGCLVKDYFPEPVTVSWNSGALTSGVHTFPAVLQSSGLYSLSSVVTVTSSNFGTQTYTCNVDHKPSNTKVDKTV

SEQ ID NO: 148 - protein, 225 aa, Artificial Sequence
  Synthetic polypeptide representing artificial human antibody VH chain
EVHLVESGGGFVQPGGSLRLSCAASGFTFSDHYMDWVRQAPGKGLEWVGRIKNRANSYNTEYAASVRGRFTISRDDSNNSLFLQMNSLTAEDTAVYYCARVKLGASSRVFDVWGQGTMVTVSSASPTSPKVFPLSLCSTQPDGNVVIACLVQGFFPQEPLSVTWSESGQGVTARNFPPSQDASGDLYTTSSQLTLPATQCLAGKSVTCHVKHYTNPSQDVTVPCP

SEQ ID NO: 149 - protein, 120 aa, Artificial Sequence
  Synthetic polypeptide representing artificial human antibody VH chain
QVQLVESGGGVVQPGRSLRLSCAASGFTFRDYGMHWVRQAPGQGLQWVAVISFDGSDKFYADSVKGRFSISRDNSRDTVYLQMNRLRPEDTAVYYCATTVTPKVTSFASWGQGSLVTVSA

SEQ ID NO: 150 - protein, 221 aa, Artificial Sequence
  Synthetic polypeptide representing artificial human antibody VH chain
CEVQLVESGGGLVKPGGSLRLSCAASGFDIRSYTIHWVRQAPGKGLEWVSSITAGGSFINYADSVKGRFTISRDNAQNSLFLQVDRLRAEDTALYFCAREQSPLYFGPSLDVWGQGTSVIVSLASTKGPSVFPLAPSSKSTSGGTAALGCLVKDYFPEPVTVSWNSGALTSGVHTFPAVLQSSGLYSLSSVVTVPSSSLGTQTYICNVNHKPSNTKVDKSE

SEQ ID NO: 151 - protein, 217 aa, Artificial Sequence
  Synthetic polypeptide representing artificial human antibody VH chain
QVQLVQSGAEVKNPGASVKVSCKASGYTFTDYYIHWVRQAPGQGLEWMGWINPNSGGTNHAQKFQGRVTMTRDMSINTAYMEVSGLRSDDTAIYYCAREPYSSYAMDVWGQGTTVTVSSASTKGPSVFPLAPSSKSTSGGTAALGCLVKDYFPEPVTVSWNSGALTSGVHTFPAVLQSSGLYSLSSVVTVPSSSLGTQTYICNVNHKPSNTKVDKKV

SEQ ID NO: 152 - protein, 218 aa, Artificial Sequence
  Synthetic polypeptide representing artificial human antibody VH chain
CEVQLLESGGGLVQPGGSLRLSCAASGFTFSNYAMSWVRQAPGKGLKWVSSISYSGGSTYYADSVKGRVTISRDNSKNTLYLQMNSLRAEDTAVYYCAKDGSEMLLCDYWGQGTLVTVSSASTKGPSVFPLAPSSKSTSGGTAALGCLVKDYFPEPVTVSWNSGALTSGVHTFPAVLQSSGLYSLSSVVTVPSSSLGTQTYICNVNHKPSNTKVDKIV

SEQ ID NO: 153 - protein, 217 aa, Artificial Sequence
  Synthetic polypeptide representing artificial human antibody VH chain
CDVHLVQSGGGLVKPGGSLRLSCAASGFNFNSYTMTWVRQAPGKGLQWVSSISSSGGDINYADSLKGRFSISRDNAKNSVFLQLNSLRAEDTAVYYCARDTRWRGLDSWGQGILVTVSSASTKGPSVFPLAPCSRSTSESTAALGCLVKDYFPEPVTVSWNSGALTSGVHTFPAVLQSSGLYSLSSVVTVTSSNFGTQTYTCNVDHKPSNTKVDKTV

SEQ ID NO: 154 - protein, 222 aa, Artificial Sequence
  Synthetic polypeptide representing artificial human antibody VH chain
GVQLVESGGDLVQPGRSLRLSCAASGFTFDDYAMHWVRQSPGKGLEWVSSISWNSGDIAYGDSVKGRFTVSRDNAKNSLHLQLNSLRVEDSALYYCAKDLLAVPGLLDDWGQGTLVTVSTASPTSPKVFPLSLCSTQPDGNVVIACLVQGFFPQEPLSVTWSESGQGVTARNFPPSQDASGDLYTTSSQLTLPATQCLAGKSVTCHVKHYTNPSQDVTVPCP

SEQ ID NO: 155 - protein, 213 aa, Artificial Sequence
  Synthetic polypeptide representing artificial human antibody VH chain
QVLLVQSGAEVKKPGSSVKVSCKASGGTFSSYGISWVRQAPGQGLEWMGGMANYAQKFQGRVTISGDESTSTAYMELSNLTSEDTAVYYCASRGGSSRRYGMGVWGQGTTVTVSSASTKGPSVFPLAPSSKSTSGGTAALGCLVKDYFPEPVTVSWNSGALTSGVHTFPAVLQSSGLYSLSSVVTVPSSSLGTQTYICNVNHKPSNTKVDKRV

SEQ ID NO: 156 - protein, 222 aa, Artificial Sequence
  Synthetic polypeptide representing artificial human antibody VH chain
CEVQLLESGGALVQPGGSLRLSCAVSGLTFNRFAMTWVRQAPGKGLEWVSHIGGSGGYTYYADSVKGRFTISRDNSKNTLYLQMNSLRAEDTAVYHCVKLKGIGAMWTYAMDVWGQGTTVTVSSASTKGPSVFPLAPCSRSTSESTAALGCLVKDYFPEPVTVSWNSGALTSGVHTFPAVLQSSGLYSLSSVVTVTSSNFGTQTYTCNVDHKPSNTKVDKTV

SEQ ID NO: 157 - protein, 227 aa, Artificial Sequence
  Synthetic polypeptide representing artificial human antibody VH chain
QLQLQESGPGLVKPSDTLSLTCTVSGYSISTAYYWGWIRQPPGKGLEWIGSIFHSGSAYYNPSLDGRVSLSVDTSKNQFSLRLKSVTAADTAVYYCARDQGYGDYDYPRDWIEPWGQGTLVTVSSASPTSPKVFPLSLDSTPQDGNVVVACLVQGFFPQEPLSVTWSESGQNVTARNFPPSQDASGDLYTTSSQLTLPATQCPDGKSVTCHVKHYTNPSQDVTVPCP

SEQ ID NO: 158 - protein, 123 aa, Artificial Sequence
  Synthetic polypeptide representing artificial human antibody VH chain
QVQLVQSGAEVKKPGSSVKVSCKASGGNVRSYSISWVRQAPGQGLEWMGGMITTFGKADYALKFRDRVTITADRSTNTVYMELSSLTSQDTAVYYCASVRDLVSGTTYYYHYWGQGTLISVSS

SEQ ID NO: 159 - protein, 214 aa, Artificial Sequence
  Synthetic polypeptide representing artificial human antibody VH chain
QVQLQESGPGLVKPSETLSLTCTVSGDSISSNYWSWIRQPPGKGLEWIGYIYYSGSTNYNPSLKSRVTISVDTSKNQFSVKLSSVTAADTAVYYCARYGDYSFDPWGQGTLVTVSSASTKGPSVFPLAPSSKSTSGGTAALGCLVKDYFPEPVTVSWNSGALTSGVHTFPAVLQSSGLYSLSSVVTVPSSSLGTQTYICNVNHKPSNTKVDKSE

SEQ ID NO: 160 - protein, 218 aa, Artificial Sequence
  Synthetic polypeptide representing artificial human antibody VH chain
QVQLVQSGAEVKKPGASVKVSCKAFGYRFSNFGISWVRQAPGQGLEWMGWISAYNGNTNYAQKLQGRVTMTTDTSTSTAYMELRSLRSDDTAVYYCARVVDTVLADFDYWGQGTLVTVSSASTKGPSVFPLAPSSKSTSGGTAALGCLVKDYFPEPVTVSWNSGALTSGVHTFPAVLQSSGLYSLSSVVTVPSSSLGTQTYICNVNHKPSNTKVDKSE

SEQ ID NO: 161 - protein, 219 aa, Artificial Sequence
  Synthetic polypeptide representing artificial human antibody VH chain
QVHLVQSGSEFKKPGASVKISCKTSGYTFTNYAMNWVRQAPGQGLEWVGWINTVTGIPGYAQGFTGRFIISLDTSGRTSYLQINSLQAEDTAVYYCARSGGFGWSRDLDYWGQGTLVTVSSASTKGPSVFPLAPCSRSTSGGTAALGCLVKDYFPEPVTVSWNSGALTSGVHTFPAVLQSSGLYSLSSVVTVPSSSLGTQTYTCNVNHKPSNTKVDKRV

SEQ ID NO: 162 - protein, 223 aa, Artificial Sequence
  Synthetic polypeptide representing artificial human antibody VH chain
PQLQLQESGPGLVKPSETLSLTCSVSGDSISSSSYFWGWIRQPPGKGLEWIGSVYYSGSTYYKPSLKSRLTISVDTSKKQFSLNLSSMTAADTAVYYCARHGFWSGPIPDAFDIWGQGTMVTVSSASTKGPSVFPLAPSSKSTSGGTAALGCLVKDYFPEPVTVSWNSGALTSGVHTFPAVLQSSGLYSLSSVVTVPSSSLGTQTYICNVNHKPSNTKVDKNE

SEQ ID NO: 163 - protein, 217 aa, Artificial Sequence
  Synthetic polypeptide representing artificial human antibody VH chain
QVQLVESGGGVVHPGRSLRLSCAASGFTFSNYGMHWLRQAPGKGLEWVAIIAYDGSQKKYADSVKGRFTISRDNSKDTMYLQMNNLRTEDTAVYYCAHEDYGSGNGNYWGQGTLVTVSSASTKGPSVFPLAPSSKSTSGGTAALGCLVKDYFPEPVTVSWNSGALTSGVHTFPAVLQSSGLYSLSSVVTVPSSSLGTQTYICNVNHKPSNTKVDKSE

SEQ ID NO: 164 - protein, 220 aa, Artificial Sequence
  Synthetic polypeptide representing artificial human antibody VH chain
PVHLVQSGAEVRKPGSSVKVSCMASGGSFNTYAVNWVRQAPGQGLEWMGGIIPVFGTTNYAPRFQGRVTITADESTSTVYMELTSLTSEDTAVYYCARDRDSGYERNCLDPWGQGTLVTVSSASTKGPSVFPLAPCSRSTSESTAALGCLVKDYFPEPVTVSWNSGALTSGVHTFPAVLQSSGLYSLSSVVTVPSSSLGTKTYTCNVDHKPSNTKVDKRV

SEQ ID NO: 165 - protein, 231 aa, Artificial Sequence
  Synthetic polypeptide representing artificial human antibody VH chain
QVQLMQSGAEVKQPGASVKVSCKASGDTFTSFAIHWVRQVSGQGLEWMGWINAGNGDTKYSQKIQGRITITRDTSARTAYMELSSLRSEDTAVYYCARGAPYGSRIYYDYDSYHGMDVWGQGTTVTVSSASPTSPKVFPLSLCSTQPDGNVVIACLVQGFFPQEPLSVTWSESGQGVTARNFPPSQDASGDLYTTSSQLTLPATQCLAGKSVTCHVKHYTNPSQDVTVPCP

SEQ ID NO: 166 - protein, 222 aa, Artificial Sequence
  Synthetic polypeptide representing artificial human antibody VH chain
QVHLQESGPGLVKPSQTLSLTCTVSGDSISNGDYCWNWIRQRPGKGLEWIGYIYHSGSTYENPSLRSRVTMSVDTSKNQFSMELTSVTAADTAVYYCARGKFDWFPRVSSFDYWGRGTLVTVSSASTKGPSVFPLAPSSKSTSGGTAALGCLVKDYFPEPVTVSWNSGALTSGVHTFPAVLQSSGLYSLSSVVTVPSSSLGTQTYICNVNHKPSNTKVDKSE

SEQ ID NO: 167 - protein, 222 aa, Artificial Sequence
  Synthetic polypeptide representing artificial human antibody VH chain
VVQLVESGGDWVQPGGSLRLSCAASGFTFRSYWMSWVRQAPGKGLEWVASVEGYRSEEYYVDSVKGRFTISRDNAKNSVYLQMNSLRAEDTAVYYCAAAYYIDTSGFDYWGQGTQVTVSSASPTSPKVFPLSLCSTQPDGNVVIACLVQGFFPQEPLSVTWSESGQGVTARNFPPSQDASGDLYTTSSQLTLPATQCLAGKSVTCHVKHYTNPSQDVTVPCP

SEQ ID NO: 168 - protein, 224 aa, Artificial Sequence
  Synthetic polypeptide representing artificial human antibody VH chain
CEVQLLESGGKLVQPGGSLRLSCAASGFTYDSYVMNWVRQAPGKGLEWVSGISASGGGTYYADSVKGRFTISRDNSKNTLYLEMNSLRADDTAVYYCAKGRTYSNNWLFHWYFDLWGRGTLVTVSSASTKGPSVFPLAPSSKSTSGGTAALGCLVKDYFPEPVTVSWNSGALTSGVHTFPAVLQSSGLYSLSSVVTVPSSSLGTQTYICNVNHKPSNTKVDKNE

SEQ ID NO: 169 - protein, 219 aa, Artificial Sequence
  Synthetic polypeptide representing artificial human antibody VH chain
PVQLQESGPGLVKPSETLSLTCTVSSGSVSSGSHYWSWIRQPPGKGLEWIGYIYYSGTSNYNPSLKGRVAISVDTSKNQFSLKLSSVTAADTAIYYCARVFSTIFHGVDPWGQGTLVTVSSASTKGPSVFPLAPSSKSTSGGTAALGCLVKDYFPEPVTVSWNSGALTSGVHTFPAVLQSSGLYSLSSVVTVPSSSLGTQTYICNVNHKPSNTKVDKKV

SEQ ID NO: 170 - protein, 224 aa, Artificial Sequence
  Synthetic polypeptide representing artificial human antibody VH chain
QVQLVQSGAEVKKPGASVKVSCRASGYSFTGYYIHWVRQAPGQGLEWMGWINPKTGDTHYAQNFQGWVTMTRDTSISTAYMELTILRSDDTAVYYCARHLSSGEYHYGLDVWGQGTTVTASSASPTSPKVFPLSLCSTQPDGNVVIACLVQGFFPQEPLSVTWSESGQGVTARNFPPSQDASGDLYTTSSQLTLPATQCLAGKSVTCHVKHYTNPSQDVTVPCP

SEQ ID NO: 171 - protein, 217 aa, Artificial Sequence
  Synthetic polypeptide representing artificial human antibody VH chain
VQLVESGGGVVQPGRSLRLSCAAPGFTFSNYGMHWVRQAPGKGLEWVAVISYDGSNKYYADSVKGRFTISRDNSKNTLYLQMNSLRAEDTAVYYCAKGKGIVGATFDYWGQGTLVTVSSASTKGPSVFPLAPSSKSTSGGTAALGCLVKDYFPEPVTVSWNSGALTSGVHTFPAVLQSSGLYSLSSVVTVPSSSLGTQTYICNVNHKPSNTKVDKNV

SEQ ID NO: 172 - protein, 224 aa, Artificial Sequence
  Synthetic polypeptide representing artificial human antibody VH chain
CEVQLVESGGGLVKPGGSLRLSCAASGFTFSNYNMNWVRQAPGKGLEWVSSISSSSSYIYYADSVKGRFTISRDNAKNSLYLQMNSLRAEDTAVYYCARDALDFDWLLSAGGFDYWGQGTLVTVSSASTKGPSVFPLAPSSKSTSGGTAALGCLVKDYFPEPVTVSWNSGALTSGVHTFPAVLQSSGLYSLSSVVTVPSSSLGTQTYICNVNHKPSNTKVDKKV

SEQ ID NO: 173 - protein, 217 aa, Artificial Sequence
  Synthetic polypeptide representing artificial human antibody VH chain
PLQLQESGPGLVKPSETLSLTCTVSGGSISSSSYYWGWIRQPPGKGLEWIGSIYYSGSTYYNPSLKSRVTISVDTSKNQFSLKLSSVTAADTAVYSCARLLVGGAFDIWGQGTMVTVSSASTKGPSVFPLAPSSKSTSGGTAALGCLVKDYFPEPVTVSWNSGALTSGVHTFPAVLQSSGLYSLSSVVTVPSSSLGTQTYICNVNHKPSNTKVDKSE

SEQ ID NO: 174 - protein, 226 aa, Artificial Sequence
  Synthetic polypeptide representing artificial human antibody VH chain
CEVQLVESGGGLVKPGGSLRLSCAASGFTFSNAWMNWVRQAPGKGLEWVGRIKSKTDGGTTDYAAPVKGRFTISRDDSKNTLYLQMNSLKTEDTAVYYCTPGSCSGGSCYSGDAFDIWGQGTMVTVSSASTKGPSVFPLAPSSKSTSGGTAALGCLVKDYFPEPVTVSWNSGALTSGVHTFPAVLQSSGLYSLSSMVTVPSSSLGTQTYICNVNHKPSNTKVDKSE

SEQ ID NO: 175 - protein, 220 aa, Artificial Sequence
  Synthetic polypeptide representing artificial human antibody VH chain
QVHLVQSGAEVKKPGASVKVSCKASGYTFTNYFIHWVRQAPGQGPEWMGVINPSFGSTTYAQKLQGRVTMTRETSTSTVYMELSSLRSEDTAVYYCARESLDSASYSTIAHWGQGTLVTVSSASTKGPSVFPLAPSSKSTSGGTAALGCLVKDYFPEPVTVSWNSGALTSGVHTFPAVLQSSGLYSLSSVVTVPSSSLGTQTYICNVNHKPSNTKVDKSE

SEQ ID NO: 176 - protein, 220 aa, Artificial Sequence
  Synthetic polypeptide representing artificial human antibody VH chain
QVQLVQSGAEVKKPGSSVKVSCKAPGGTFNNYGISWVRQAPGQGLEWMGGIMPMFGRTSETQKFQGRVTISADESTSTVYMEMSSLRFDDTAVYYCARDRGGNSWLDVFDMWGQGTMVTVSSASTKGPSVFPLAPCSRSTSESTAALGCLVKDYFPEPVTVSWNSGALTSGVHTFPAVLQSSGLYSLSSVVTVPSSNFGTQTYTCNVDHKPSNTKVDKTV

SEQ ID NO: 177 - protein, 224 aa, Artificial Sequence
  Synthetic polypeptide representing artificial human antibody VH chain
EVQLLESGGGLVHPGGSLRLSCVASGFTFSSYEMTWVRQAPGKGLEWISYISSTGTTTYHADSVRGRFTISRDNAKSSLFLQMNSLRVEDTALYYCARSPAAFGSESYFDSWGQGVLVTVSSASPTSPKVFPLSLCSTQPDGNVVIACLVQGFFPQEPLSVTWSESGQGVTARNFPPSQDASGDLYTTSSQLTLPATQCLAGKSVTCHVKHYTNPSQDVTVPCP

SEQ ID NO: 178 - protein, 222 aa, Artificial Sequence
  Synthetic polypeptide representing artificial human antibody VH chain
QVQLVESGGGVVQPGRSLRLSCAASGFTFTTYAVHWVRQAPGKGLEWVAVISNDGSNKNYADSVRGRFIISRDNSKNTLYLQMNSLRAEDTAVYYCAKDLLEDPYFGDLLFDYWGQGTLVTVSSASTKGPSVFPLAPSSKSTSGGTAALGCLVKDYFPEPVTVSWNSGALTSGVHTFPAVLQSSGLYSLSSVVTVPSSSLGTQTYICNVNHKPSNTKVDKNV

SEQ ID NO: 179 - protein, 223 aa, Artificial Sequence
  Synthetic polypeptide representing artificial human antibody VH chain
EVQLVQSGAEVKKSGESLKISCKGSGYTFTSYWIAWVRQMPGKGLEWMGIIYPGDSDTRYSPSFQGQVTISADKSISTAYLQWSSLKASDTAMYYCVRTPAVGTDPDYWGQGTLVTVSSGSASAPTLFPLVSCENSPSDTSSVAVGCLAQDFLPDSITFSWKYKNNSDISSTRGFPSVLRGGKYAATSQVLLPSKDVMQGTDEHVVCKVQHPNGNKEKNVPLP

SEQ ID NO: 180 - protein, 217 aa, Artificial Sequence
  Synthetic polypeptide representing artificial human antibody VH chain
EVQLMESGGGLVQPGGSLRLSCAASGLTFSIYSMNWVRQAPGKGLEWVSYISRGSSVIYHADSVKGRFTISRDDGKNLLYLQMNSLRDDDTAMYYCSSGGSTSMVGRYWGQGSLVTVSSASTKGPSVFPLAPSSKSTSGGTAALGCLVKDYFPEPVTVSWNSGALTSGVHTFPAVLQSSGLYSLSSVVTVPSSSLGTQTYICNVNHKPSNTKVDKRV

SEQ ID NO: 181 - protein, 220 aa, Artificial Sequence
  Synthetic polypeptide representing artificial human antibody VH chain
QVTLKESGPVLVKPTETLTLTCTVSGFSLSNARMGVSWIRQPPGKALEWLGHIFSNDEKSYSTSLKSRLTISKDTSKSQVVLTLTNMDPVDTATYYCARMTPFKFGLCPDYWGQGTLVTVSSASTKGPSVFPLAPSSKSTSGGTAALGCLVKDYFPEPVTVSWNSGALTSGVHTFPAVLQSSGLYSLSSVVTVPSSSLGTQTYICNVNHKPSNTKVDKKV

SEQ ID NO: 182 - protein, 219 aa, Artificial Sequence
  Synthetic polypeptide representing artificial human antibody VH chain
QVQLVQSGAEVKKPGASVKVSCKASGYTFTVYYMHWVRQAPGQGLEWMGRINPNSGGTNYAQKFQGRVTMTRDTSISTAYMELSRLTSDDTAVYYCARVVVVGTDYGMDVWGQGTTVTVSSASTKGPSVFPLAPSSKSTSGGTAALGCLVKDYFPEPVTVSWNSGALTSGVHTFPAVLQSSGLYSLSSVVTVPSSSLGTQTYICNVNHKPSNTKVDKSE

SEQ ID NO: 183 - protein, 219 aa, Artificial Sequence
  Synthetic polypeptide representing artificial human antibody VH chain
QVQLVQSGAEVKKPGASVKVSCKASGYTFTSYGISWVRQAPGQGLEWMGWISAYNGNTNYAQKLQGRVTMTTDTSTSTAYMELRSLTSDDTAVYYCARDQGLERANWFDPWGQGTLVTVSSASTKGPSVFPLAPSSKSTSGGTAALGCLVKDYFPEPVTVSWNSGALTSGVHTFPAVLQSSGLYSLSSVVTVPSSSLGTQTYICNVNHKPSNTKVDKKV

SEQ ID NO: 184 - protein, 217 aa, Artificial Sequence
  Synthetic polypeptide representing artificial human antibody VH chain
QVHLQESGPGLVKPSRTLSLTCAISGDSVSSTSAAWNWIRQSPSGGLEWLGRTFYRTKWYSESTGSLKSRIIVNPDTSKNQFSLQLNSVTPEDTAVYYCARGVRHFDYWGQGTLVTVSSASTKGPSVFPLAPSSKSTSGGTAALGCLVKDYFPEPVTVSWNSGALTSGVHTFPAVLQSSGLYSLSSVVTVPSSSLGTQTYICNVNHKPSNTKVDKKV

SEQ ID NO: 185 - protein, 217 aa, Artificial Sequence
  Synthetic polypeptide representing artificial human antibody VH chain
QVQLQESGPGLVKPSGTLSLTCAVSGGSISSSNCWSWVRQPPGKGLEWLGEICHSGSTSYNPSLKSRVTISVDKSKNQFSLKLRSVTAADTAVYYCARESPLTVVFDYWGQGTLVTVSSASTKGPSVFPLAPSSKSTSGGTAALGCLVKDYFPEPVTVSWNSGALTSGVHTFPAVLQSSGLYSLSSVVTVPSSSLGTQTYICNVNHKPSNTKVDKKV

SEQ ID NO: 186 - protein, 215 aa, Artificial Sequence
  Synthetic polypeptide representing artificial human antibody VH chain
EVQLVESGGGLVQPGGSLRLSCAASGFTVSSNYMSWVRQAPGKGLEWVSVIYSGGSTYYADSVKGRFTISRDNSKNTLSLQMNSLRAEDTAVYYCARESSAAGYDYWGQGTLVTVSSASTKGPSVFPLAPSSKSTSGGTAALGCLVKDYFPEPVTVSWNSGALTSGVHTFPAVLQSSGLYSLSSVVTVPSSSLGTQTYICNVNHKPSNTKVDKSV

SEQ ID NO: 187 - protein, 221 aa, Artificial Sequence
  Synthetic polypeptide representing artificial human antibody VH chain
QVQLVQSGAEVRKPGASVKVSCKASGYTFTTYYIHWVRQAPGQGLEWMGLINPNGGTTNYAQKFQGRLSMTTDTSTNTVYMELSSLRSEDTAVYYCARKLMSGIVSRGWFDPWGQGTLVTVSSASTKGPSVFPLAPSSKSTSGGTAALGCLVKDYFPEPVTVSWNSGALTSGVHTFPAVLQSSGLYSLSSVVTVPSSSLGTQTYICNVNHKPSNTKVDKSV

SEQ ID NO: 188 - protein, 220 aa, Artificial Sequence
  Synthetic polypeptide representing artificial human antibody VH chain
PVQLQESGPGLVKPSETLSLTCTVSGGSVSSGSYYWSWIRQPPGKGLEWIGYIYYSGSTNYNPSLKSRVTISVDTSKNQFSLKLSSVTAADTAVYYCARDRGDYVTHWFDPWGQGTLVTVSSASTKGPSVFPLAPSSKSTSGGTAALGCLVKDYFPEPVTVSWNSGALTSGVHTFPAVLQSSGLYSLSSVVTVPSSSLGTQTYICNVNHKPSNTKVDKSE

SEQ ID NO: 189 - protein, 219 aa, Artificial Sequence
  Synthetic polypeptide representing artificial human antibody VH chain
QLQLQESGPGLVKPWETLSLSCTVSGGSISSSFFYWGWIRQPPGKGLQWIGNIHYTGSTYYNPSLKSRITMSVDTSKNQFSLKLSSVTAADTAVYYCARHRVGDSPGLHYWGQGTLVTVSSASTKGPSVFPLAPSSKSTSGGTAALGCLVKDYFPEPVTVSWNSGALTSGVHTFPAVLQSSGLYSLSSVVTVPSSSLGTQTYICNVNHKPSNTKVDKSE

SEQ ID NO: 190 - protein, 217 aa, Artificial Sequence
  Synthetic polypeptide representing artificial human antibody VH chain
QVQLVESGGGVVQPGRSLRLSCAASGFTFSSYAMHWVRQAPGKGLEWVAVISYDGSNKYYADSVKGRFTISRDNSKNTLYLQMNSLRAEDTAVYYCASPIAVAAPFAYWGQGTLVTVSSASTKGPSVFPLAPSSKSTSGGTAALGCLVKDYFPEPVTVSWNSGALTSGVHTFPAVLQSSGLYSLSSVVTVPSSSLGTQTYICNVNHKPSNTKVDKSE

SEQ ID NO: 191 - protein, 229 aa, Artificial Sequence
  Synthetic polypeptide representing artificial human antibody VH chain
CEVQLLESGGGLVQPGGSLRLSCAASGFTFSTYVMSWVRQAPGKGLEWVSLISGSGGSTHYADSVRGRFTISRDNSKNTLYLQMNSLRAEDTAVYYCVKDYLAVGGTYYDYFDYWGQGTLVTVSSGSASAPTLFPLVSCENSPSDTSSVAVGCLAQDFLPDSITFSWKYKNNSDISSTRGFPSVLRGGKYAATSQVLLPSKDVMQGTDEHVVCKVQHPNGNKEKNVPLP

SEQ ID NO: 192 - protein, 217 aa, Artificial Sequence
  Synthetic polypeptide representing artificial human antibody VH chain
PLQLQESGPGLVKPSETLSLTCTVSGGSISSSSYYWGWIRQSPGKGLEWMGSIYYSGSTYYNPSLKSRVTISVDTSKNQFSLNLSSVTAADTAVYYCARHDYRNYFDYWGQGTLVTVSSASTKGPSVFPLAPSSKSTSGGTAALGCLVKDYFPEPVTVSWNSGALTSGVHTFPAVLQSSGLYSLSSVVTVPSSSLGTQTYICNVNHKPSNTKVDKSE

SEQ ID NO: 193 - protein, 220 aa, Artificial Sequence
  Synthetic polypeptide representing artificial human antibody VH chain
QVQLVQSGAEVKKPGASVKVSCQASGYTFTGYYIHWVRQAPGQGLEWMGWINPNSGGTNYAQKFQGRVTMTRDTSISTAHMELGRLRSDDTAVYYCATPPSRYGGNYYADYWGQGTLVTVSSASTKGPSVFPLAPSSKSTSGGTAALGCLVKDYFPEPVTVSWNSGALTSGVHTFPAVLQSSGLYSLSSVVTVPSSSLGTQTYICNVNHKPSNTKVDKKV

SEQ ID NO: 194 - protein, 216 aa, Artificial Sequence
  Synthetic polypeptide representing artificial human antibody VH chain
PVQLVQSGAEVKKPGDSLSISCEVSGYSFTSYWIGWVRQMPGKGLEWMAIINPADSDTRYSPSFRGQVTISVDKSINTAYLQWTSLQASDTAMYYCARQGPTVAIDFWGQGTLVTVSSASTKGPSVFPLAPSSKSTSGGTAALGCLVKDYFPEPVTVSWNSGALTSGVHTFPAVLQSSGLYSLSSVVTVPSSSLGTQTYICNVNHKPSNTKVDKSE

SEQ ID NO: 195 - protein, 116 aa, Artificial Sequence
  Synthetic polypeptide representing artificial human antibody VH chain
EVQLVQSGAEVKKPGESLKISCKGSGYSFTTYWIAWVRQMPGKGLEWMGIIYPADSDTRYSPSFQGQVTMSADQSINTAYLQWSSLKASDTAMYYCARRGREFDYWGQGTLLTVSS

SEQ ID NO: 196 - protein, 223 aa, Artificial Sequence
  Synthetic polypeptide representing artificial human antibody VH chain
CEVQLLESGGGLVQPGGSLRLSCAASGFTFRIYAMSWVRQAPGKGLEWVSAISYSGNTTYYADSVKGRFTISRDNSKNTLYLQINNLRAEDTAIYYCAIQEKRELQLRRELDNYWGQGTLVTVSSASTKGPSVFPLAPSSKSTSGGTAALGCLVKDYFPEPVTVSWNSGALTSGVHTFPAVLQSSGLYSLSSVVTVPSSSLGTQTYICNVNHKPSNTKVDKKV

SEQ ID NO: 197 - protein, 117 aa, Artificial Sequence
  Synthetic polypeptide representing artificial human antibody VH chain
QVQLVQSGAEVKKPGASVKVSCKASGYTFTSYYMYWVRQAPGQGLEWMGIINPGGGSTSYAQKFQGRVTMTRDTSTSTVYMELSSLRSEDTAVYYCARVFRYGMDVWGQGTTVTVSS

SEQ ID NO: 198 - protein, 117 aa, Artificial Sequence
  Synthetic polypeptide representing artificial human antibody VH chain
QVQVVESGGGLVKPGGSLRLSCAVSGLDFRDYYVNWIRQAPGKGLEWLSYITSPGGHTSYSDSVKGRFTISRDNAKNSVYLQMDSLTVEDTAVYFCAIKEGYGLSDWGQGTLVTVSS

SEQ ID NO: 199 - protein, 223 aa, Artificial Sequence
  Synthetic polypeptide representing artificial human antibody VH chain
VVQLLESGGGLVQPGGSLRLSCAASGFTFISYAMSWVRQAPGKGLEWVSDISGSGGSTYYADSVKGRLTISRDNSNNTLYLQMNSLRAEDTAVYYCAKEDGYTQNFDYWGQGTLVTVSSGSASAPTLFPLVSCENSPSDTSSVAVGCLAQDFLPDSITFSWKYKNNSDISSTRGFPSVLRGGKYAATSQVLLPSKDVMQGTDEHVVCKVQHPNGNKEKNVPLP

SEQ ID NO: 200 - protein, 121 aa, Artificial Sequence
  Synthetic polypeptide representing artificial human antibody VH chain
QVQLVQSGAEVKKPGASVKISCKASGYTFTSHAIHWVRQAPGQTFEWLGWINPVNGVTKYSQTFQDRVTIVRDKSATTTYMDLSGLTFEDTAMYYCARVLDFYGSSVLDYWGQGTLVTVSS

SEQ ID NO: 201 - protein, 115 aa, Artificial Sequence
  Synthetic polypeptide representing artificial human antibody VH chain
HVQLVQSGSELKKPGASVKLSCKASGYTFTNYAMNWVRQAPGQGLEWMGWINTNTGNPTYAQGFTGRFVFSLDTSVSTAYLQISSLKAEDTALYYCARDRPGDYWGQGTLVTVSS

SEQ ID NO: 202 - protein, 216 aa, Artificial Sequence
  Synthetic polypeptide representing artificial human antibody VH chain
QVQLVESGGGVVQPGRSLRLSCAASGFTFSNFAMHWVRQAPGKGLEWVVVISSDGSNKNYADSVKGRFTISRDNSKNTLYLQMNSLRAEDTAVYYCARDLGVGSTTYWGQGTLVTVSSASTKGPSVFPLAPSSKSTSGGTAALGCLVKDYFPEPVTVSWNSGALTSGVHTFPAVLQSSGLYSLSSVVTVPSSSLGTQTYICNVNHKPSNTKVDKRV

SEQ ID NO: 203 - protein, 219 aa, Artificial Sequence
  Synthetic polypeptide representing artificial human antibody VH chain
GEQLLESGGGLVQPGGSLRLSCAASGFTFSHYAMTWVRQAPGKGLEWVSGVSGSGFTTYYADSVKGRFTISRDNAQNTLYLHMNSLRAEDTAIYYCVKDLEVSIGHNFDFWGQGTLVTVSSASTKGPSVFPLAPSSKSTSGGTAALGCLVKDYFPEPVTVSWNSGALTSGVHTFPAVLQSSGLYSLSSVVTVPSSSLGTQTYICNVNHKPSNTKVDKRV

SEQ ID NO: 204 - protein, 225 aa, Artificial Sequence
  Synthetic polypeptide representing artificial human antibody VH chain
EVQLVESGGGLVKPGGSLRLSCAASGFTFSSYSMNWVRQAPGKGLEWVSSISSSSSYIYYADSVKGRFTISRDNAKNSLYLQMNSLRAEDTAVYYCARDRGVVVVAATPYYYGMDVWGQGTTVTVSSASTKGPSVFPLAPSSKSTSGGTAALGCLVKDYFPEPVTVSWNSGALTSGVHTFPAVLQSSGLYSLSSVVTVPSSSLGTQTYICNVNHKPSNTKVDKKV

SEQ ID NO: 205 - protein, 223 aa, Artificial Sequence
  Synthetic polypeptide representing artificial human antibody VH chain
QITLKESGPTLVKPTQTLTLTCTFSGFSLSTNGVGVGWIRQPPGKALEWLALINWDDDKRYSPSLKSRLTITKDTSKNQVVLTMTNLDPVDTATYYCVHARDDYGDSAWSTGPVWGQGTLVTVSSASTKGPSVFPLAPSSKSTSGGTAALGCLVKDYFPEPVTVSWNSGALTSGVHTFPAVLQSSGLYSLSSVVTVPSSSLGTQTYICNVNHKPSNTKVDKRV

SEQ ID NO: 206 - protein, 223 aa, Artificial Sequence
  Synthetic polypeptide representing artificial human antibody VH chain
LITLKESGPTLVKPTQTLTLTCTVSGLSLSTSGVAVGWIRQPPGKALEWLALIYWDDDTRYSPSLKSRLSITKDTSKNQVVLTMRNVDPVDTATYYCGHRRLLRGVTTTVYFDPWGQGTLVTVSSASTKGPSVFPLAPSSKSTSGGTAALGCLVKDYFPEPVTVSWNSGALTSGVHTFPAVLQSSGLYSLSSVVTVPSSSLGTQTYICNVNHKPSNTKVDKRV

SEQ ID NO: 207 - protein, 223 aa, Artificial Sequence
  Synthetic polypeptide representing artificial human antibody VH chain
PVQLQESGPGLVNPSQTLSLTCTVSGGSISSGGYCWSWVRQHPGKGLEWIGCIYYIGTTYYMRSLKSRLIISIDTSKNQFSLKLTSVTAADSAVYYCARGGELLGGFGYSGMDVWGQGTTVTVSSASTKGPSVFPLAPCSRSTSESTAALGCLVKDYFPEPVTVSWNSGALTSGVHTFPAVLQSSGLYSLSSVVTVPSSSLGTKTYTCNVDHKPSNTKVDKRV

SEQ ID NO: 208 - protein, 224 aa, Artificial Sequence
  Synthetic polypeptide representing artificial human antibody VH chain
ELQLVESGGGLVQPGGSLRLSCAASGFTFSSYWMSWVRQAPGKGLEWVANINQDGGEKYYVDSVKGRFTISRDNAKNSLYLQMNSLRAEDTAVYYCAHYYYDSSGYYQNAEYFQYWGQGTLVTVSSASTKGPSVFPLAPSSKSTSGGTAALGCLVKDYFPEPVTVSWNSGALTSGVHTFPAVLQSSGLYSLSSVVTVPSSSLGTQTYICNVNHKPSNTKVDKKV

SEQ ID NO: 209 - protein, 226 aa, Artificial Sequence
  Synthetic polypeptide representing artificial human antibody VH chain
QVQLVQSGAEVKKPGSSVKVSCKASRGTFSNHAVSWVRQAPGQGLEWVGGIIPVFGPPNYAQKFRGRVTITADRSTNTAYMELNSLRSEDTAVYYCARTQWGTDVEATNPYYYFMDVWGKGTTVTVSSASTKGPSVFPLAPSSKSTSGGTAALGCLVKDYFPEPVTVSWNSGALTSGVHTFPAVLQSSGLYSLSSVVTVPSSSLGTQTYICNVNHKPSNTKVDKRV

SEQ ID NO: 210 - protein, 217 aa, Artificial Sequence
  Synthetic polypeptide representing artificial human antibody VH chain
QVQLVQSGTEMKRPGSSVKVSCKASGGTFNFYAINWVRQAPGQGLEWMGGIVPIFDTTTYAQRFQGRVTITADESTTTVHMELSSLRFDDTAVYYCARDQSGADRFDSWGQGTLVTVSSASTKGPSVFPLAPSSKSTSGGTAALGCLVKDYFPEPVTVSWNSGALTSGVHTFPAVLQSSGLYSLSSVVTVPSSSLGTQTYICNVNHKPSNTKVDKSE

SEQ ID NO: 211 - protein, 218 aa, Artificial Sequence
  Synthetic polypeptide representing artificial human antibody VH chain
QVQLVQSGAEVKKPGASVKISCQAFGYNFIDNAIHWVRQAPGQRPEWMGWINAGNGNTRYSQNFQGRVTITKVTSASTAYMEMSRLKSEDTAVYFCARSSKWTDWHFDYWGQGTLVTVSSASTKGPSVFPLAPSSKSTSGGTAALGCLVKDYFPEPVTVSWNSGALTSGVHTFPAVLQSSGLYSLSSVVTVPSSSLGTQTYICNVNHKPSNTKVDKSE

SEQ ID NO: 212 - protein, 219 aa, Artificial Sequence
  Synthetic polypeptide representing artificial human antibody VH chain
QIQLVQSGAEVKKPGASVKVSCKTSGYTFTHYGVAWVRQAPGQGPEWMGWISPYNGNIEYGQKFQGRVTMTTDTSTNTAYMELRSLRYDDTAVYYCARDLDEINSSWLDPWGQGTLIIVSPASTKGPSVFPLAPSSKSTSGGTAALGCLVKDYFPEPVTVSWNSGALTSGVHTFPAVLQSSGLYSLSSVVTVPSSSLGTQTYICNVNHKPSNTKVDKSE

SEQ ID NO: 213 - protein, 226 aa, Artificial Sequence
  Synthetic polypeptide representing artificial human antibody VH chain
VVQLLESGGGVVQPGGSLRLSCAASGFTFSNYAMNWVRQAPGKGLEWVTGISGPGESSYYADSVKGRFTVSRDNYRNTLYLQMNDLGAEDTATYFCAKRPTAGNSYGGYYFDHWGQGTLVTVSSASPTSPKVFPLSLCSTQPDGNVVIACLVQGFFPQEPLSVTWSESGQGVTARNFPPSQDASGDLYTTSSQLTLPATQCLAGKSVTCHVKHYTNPSQDVTVPCP

SEQ ID NO: 214 - protein, 224 aa, Artificial Sequence
  Synthetic polypeptide representing artificial human antibody VH chain
QVQLVQSGAEVKKPGASVKLSCKPSGYTFSSYYIHWLRQAPGQGLEWMGIINPSGGYTSSAQKFQGRVTMTRDTSTSTIYMELSSLRAEDTAVYYCARRGEVGTMVRVFRKPFDYWGQGTLVTVSSASTKGPSVFPLAPSSKSTSGGTAALGCLVKDYFPEPVTVSWNSGALTSGVHTFPAVLQSSGLYSLSSVVTVPSSSLGTQTYICNVNHKPSNTKVDKKV

SEQ ID NO: 215 - protein, 223 aa, Artificial Sequence
  Synthetic polypeptide representing artificial human antibody VH chain
PVQLVQSGAEVKKPGESLKISCQGSGYNFSRYWIGWVRQMPGKGLEWMGVVFPGDSDIRYSLSFQGHITIYADNSISTAYLQWSSLKASDTAIYYCATTSTMPMPTRGRDWFDPWGQGTLVTVSSASTKGPSVFPLAPSSKSTSGGTAALGCLVKDYFPEPVTVSWNSGALTSGVHTFPAVLQSSGLYSLSSVVTVPSSSLGTQTYICNVNHKPSNTKVDKRV

SEQ ID NO: 216 - protein, 216 aa, Artificial Sequence
  Synthetic polypeptide representing artificial human antibody VH chain
QVQLVESGGGVVQPGTSLTLSCEASGFTFNRYGMHWVRQAPGKGLEWVAVIWYDGTNKYYADSVRGRFTISRDNSKNTLYLQMNTLRGDDTAVYFCAGAHGDYGLDYWGQGTLVTVSSASTKGPSVFPLAPSSKSTSGGTAALGCLVKDYFPEPVTVSWNSGALTSGVHTFPAVLQSSGLYSLSSVVTVPSSSLGTQTYICNVNHKPSNTKVDKRE

SEQ ID NO: 217 - protein, 220 aa, Artificial Sequence
  Synthetic polypeptide representing artificial human antibody VH chain
EVQLVQSGAEVKKPGESLRISCKGSGYSFTSFWISWVRQMPGKGLEWMGRIDPSDSYTNYSPSFQGHVTISADKSISTAFLQWSSLKASDTAMYYCARHQQKYSPISPLDYWGQGTLVTVSSASTKGPSVFPLAPSSKSTSGGTAALGCLVKDYFPEPVTVSWNSGALTSGVHTFPAVLQSSGLYSLSSVVTVPSSSLGTQTYICNVNHKPSNTKVDKRV

SEQ ID NO: 218 - protein, 120 aa, Artificial Sequence
  Synthetic polypeptide representing artificial human antibody VH chain
EVQLVESGGGVIKPGGSLKLSCEGSGFTLDDYVMHWVRQAPGKGLEWISSISGDGTRTYYADSVKGRFTISRNNGKNSLYLQMDSLRREDTALYYCAKDARLAYYGMDVWGQGTTVTVSS

SEQ ID NO: 219 - protein, 121 aa, Artificial Sequence
  Synthetic polypeptide representing artificial human antibody VH chain
QLQLQESGPGLVKPSETLSLTCTVSGDSISSSGFFWAWIRQAPGKGLDWIGSTYHRTTTTYYNPSLKSRVTISVDTSKNQFSLTLNSLTAADTAVYYCARHSSGYSELAYWGQGTLVIVST

SEQ ID NO: 220 - protein, 223 aa, Artificial Sequence
  Synthetic polypeptide representing artificial human antibody VH chain
QEQLVQSGAEVKKPGSSVKVSCKVSGGPFKTYPINWVRQAPGQGLEWMGGITPNSGTPNYAQKFQGRVTITADESTTTVYMQLSSLRSEDTAVYYCARVHNWDFYYGMDVWGLGTTVTVSSASPTSPKVFPLSLCSTQPDGNVVIACLVQGFFPQEPLSVTWSESGQGVTARNFPPSQDASGDLYTTSSQLTLPATQCLAGKSVTCHVKHYTNPSQDVTVPCP

SEQ ID NO: 221 - protein, 226 aa, Artificial Sequence
  Synthetic polypeptide representing artificial human antibody VH chain
EVQVVESGGGLVQPGRSLRLSCTPSGFTFGDNAMGWFRQAPGKGLEWVGFIRSKAYGGTRDYAASVKGRFTISRDDSKSIAYLQMNSLKTEDTAVYYCTRERPPNCGSSCPETWGQGTLVTVSSASPTSPKVFPLSLCSTQPDGNVVIACLVQGFFPQEPLSVTWSESGQGVTARNFPPSQDASGDLYTTSSQLTLPATQCLAGKSVTCHVKHYTNPSQDVTVPCP

SEQ ID NO: 222 - protein, 119 aa, Artificial Sequence
  Synthetic polypeptide representing artificial human antibody VH chain
QVQLVQSGSEVKKPGASVRLACKTSGYTFSNYGVSWVRQGPGRGLEWLGWISGYNGRTHSADKFRDRVTLTTDTSTTTVYVDLKNLTSDDTAVYYCARVGTSHWYSDSWGQGTLVTVSS

SEQ ID NO: 223 - protein, 117 aa, Artificial Sequence
  Synthetic polypeptide representing artificial human antibody VH chain
EVQLVESGGGMVQPGESLRLSCAASGFDFTSYWMAWVRQAPGKGLEWVANMNADGSEKHYVDSVKGRFSISRDNAKKLLFLQMNSLTVDDTGVYYCARDEGRREGAWGQGTQVIVSA

SEQ ID NO: 224 - protein, 219 aa, Artificial Sequence
  Synthetic polypeptide representing artificial human antibody VH chain
CEVQLVESGGGLVQPGGSLRLSCAASGFTFSSYSMNWVRQAPGKGLEWVSYISSSSSTIYYADSVKGRFTISRDNAKNSLYLQMNSLRAEDTAVYYCARDIALGRGGMDVWGQGTTVTVSSGSASGPSVFPLAPSSKSTSGGTAALGCLVKDYFPEPVTVSWNSGALTSGVHTFPAVLQSSGLYSLSSVVTVPSSSLGTQTYICNVNHKPSNTKVDKNV

SEQ ID NO: 225 - protein, 120 aa, Artificial Sequence
  Synthetic polypeptide representing artificial human antibody VH chain
QLQLQESGPGLVKPSETLSLTCTVSGVSIGTSSYYWGWIRQPPAKGLEWIGSIYYSGSTYYNPSLKNRVTISVDTSKNHFSLKLSSVTAADTAVYYCARHRTGQYYYNSWGQGTLVTVSS

SEQ ID NO: 226 - protein, 117 aa, Artificial Sequence
  Synthetic polypeptide representing artificial human antibody VH chain
QVQLQESGPGLVKPSETLSLTCSVSGDSFSDYYWSWTRQSPGKGLEWLGYMFYGGSTNYNPSLKSRLTMSVDTSKKHVYLKLSSVTAADTAVYYCAASGYGDHVAYWGQGTLVTVSS

SEQ ID NO: 227 - protein, 221 aa, Artificial Sequence
  Synthetic polypeptide representing artificial human antibody VH chain
QVQLVESGGGVVQPGRSLRLSCVASGFTFSNYAMHWVRQAPGKGLEWVAVIWYDGSNEYYRDSVEGRFTISRDSSKNTLYLLVNSLRAEDTAVYYCARGNGPKSGKYSDFDYWGQGTLVTVSSASTKGPSVFPLAPSSKSTSGGTAALGCLVKDYFPEPVTVSWNSGALTSGVHTFPAVLQSSGLYSLSSVVTVPSSSLGTQTYICNVNHKPSNTKVDKSE

SEQ ID NO: 228 - protein, 117 aa, Artificial Sequence
  Synthetic polypeptide representing artificial human antibody VH chain
QVQLVQSGTEVKKPGASVKVSCKASGYRFTSNGISWVRQAPGQGLQWMGWISTDSGNTNYAQSFQGRVTLTRDTSTNTAYLELRRLRSEDTAVYYCARDKSWYFDYWGQGTLVSVSS

SEQ ID NO: 229 - protein, 221 aa, Artificial Sequence
  Synthetic polypeptide representing artificial human antibody VH chain
CEVQLVESGGGVVRPGGSLRLSCAASGFTFDDYGMSWVRQAPGKGLEWVSGIHWNGGSTGYADSVKGRFTISRDNAKNSLYLQMNSLRAEDTALYHCARSTASSGYYDAFDIWGQGTMVTVSSASTKGPSVFPLAPSSKSTSGGTAALGCLVKDYFPEPVTVSWNSGALTSGVHTFPAVLQSSGLYSLSSVVTVPSSSLGTQTYICNVNHKPSNTKVDKSE

SEQ ID NO: 230 - protein, 227 aa, Artificial Sequence
  Synthetic polypeptide representing artificial human antibody VH chain
QVQLVESGGGVVQPGRSLRLSCAASGFSFSAYGMHWVRQAPGKGLEWVAIMWYDGNNKYYADSVKGRFTISRDNSKNTLYLQMNSLRAEDTAVYYCARDRREYSSSSRPSYHYYYMDVWGKGTTVTVSSASTKGPSVFPLAPSSKSTSGGTAALGCLVKDYFPEPVTVSWNSGALTSGVHTFPAVLQSSGLYSLSSVVTVPSSSLGTQTYICNVNHKPSNTKVDKSE

SEQ ID NO: 231 - protein, 218 aa, Artificial Sequence
  Synthetic polypeptide representing artificial human antibody VH chain
VVQLLESGGGLVHPGGSLRISCAASEFTFSAYAMTWVRQAPGKGLEWVSAISGSGGRTYYADSLKGRFTISRDNSKHTLYLLMNSLRVEDTAVYYCASRYRSPSGAFDIWGQGTLVTVSSASTKGPSVFPLAPSSKSTSGGTAALGCLVKDYFPEPVTVSWNSGALTSGVHTFPAVLQSSGLYSLSSVVTVPSSSLGTQTYICNVNHKPSNTKVDKRV

SEQ ID NO: 232 - protein, 215 aa, Artificial Sequence
  Synthetic polypeptide representing artificial human antibody VH chain
EVQLVESGGGLVKPGGSLRLSCAASGFTFSNAWMNWVRQTPGKGLEWVGRIKTKTDGGTTDYAEPVKGRFTISRDDSKNTLYLQMNSLKTEDTAVYYCTRGAVADYWGQGTQVTVSSASTKGPSVFPLAPSSKSTSGGTAALGCLVKDYFPEPVTVSWNSGALTSGVHTFPAVLQSSGLYSLSSVVTVPSSSLGTQTYICNVNHKPSNTKVDKRV

SEQ ID NO: 233 - protein, 219 aa, Artificial Sequence
  Synthetic polypeptide representing artificial human antibody VH chain
QVQLKQSGGGVVQPGRSLTLSCVASGLTFSDYGMHWVRQAPGKGLEWVAVIWHDGSKTNYADSVKGRIIISRDNSKSTVYLQMNRLRGEDTAVYYCATSHGGLVPGGENYWGQGTLVTVSSASTKGPSVFPLAPSSKSTSGGTAALGCLVKDYFPEPVTVSWNSGALTSGVHTFPAVLQSSGLYSLSSVVTVPSSSLGTQTYICNVNHKPSNTKVDKRV

SEQ ID NO: 234 - protein, 123 aa, Artificial Sequence
  Synthetic polypeptide representing artificial human antibody VH chain
QVQLVQSGSELKKPGASVKVSCTSSGYVFTSFGVSWVRQVPGQGPEWMGWISPYTRQTKYAQSLQGRITLTADTSTNTTYMELRSLRSDDTAMYYCVREEFGVVRGPNPFDVWGQGTMVTVSS

SEQ ID NO: 235 - protein, 224 aa, Artificial Sequence
  Synthetic polypeptide representing artificial human antibody VH chain
EVQLVESGGGVVQPGGSLRLSCAASGFTFEDFGMHWVRQAPGKGLEWVAFTRFDGSEKYYVDSVKGRFTVSRDNSKNTLFLHMNSLRPEDTAVYYCAKTRSYSSADTTRPNAPGYWGQGTLVTVSSASTKGPSVFPLAPSSKSTSGGTAALGCLVKDYFPEPVTVSWNSGALTSGVHTFPAVLQSSGLYSLSSVVTVPSSSLGTQTYICNVNHKPSNTKVDKRV

SEQ ID NO: 236 - protein, 220 aa, Artificial Sequence
  Synthetic polypeptide representing artificial human antibody VH chain
QVQLVESGGGVVQPGRSLRLSCAASGFTLSTYGMHWVRQAPGKGLEWVAVISHDGSNNYYADYVKGRFTISRDNSKNTLYLQMNSLRIEDTAVYYCAKDGQTGTTTPYFDYWGQGTLVTVSSASTKGPSVFPLAPCSRSTSESTAALGCLVKDYFPEPVTVSWNSGALTSGVHTFPAVLQSSGLYSLSSVVTVTSSNFGTQTYTCNVDHKPSNTKVDKTV

SEQ ID NO: 237 - protein, 219 aa, Artificial Sequence
  Synthetic polypeptide representing artificial human antibody VH chain
PVQLVQSGAQVKKPGASVRLSCKSSGYTFSNYAIHWLRQAPGQRLEWVGWIHVGNDHTRYSQSFQGRVTISADTSANTAYMEVRGLRSEDTSLFYCARAGAEGVDYWGQGTQVTVSSASPTSPKVFPLSLCSTQPDGNVVIACLVQGFFPQEPLSVTWSESGQGVTARNFPPSQDASGDLYTTSSQLTLPATQCLAGKSVTCHVKHYTNPSQDVTVPCP

SEQ ID NO: 238 - protein, 219 aa, Artificial Sequence
  Synthetic polypeptide representing artificial human antibody VH chain
AVQLVQSGAEVKKPGESLRISCKGSGYSFSTYWIIWVRQMPGKGLEWIGRFDPSDSYNVNSPSFQGHVTISADTSINTAYLQWSSLKASDSAMYYCARRSDKAVPGTFDQWGQGTLVTVSSASTKGPSVFPLAPCSRSTSESTAALGCLVKDYFPEPVTVSWNSGALTSGVHTFPAVLQSSGLYSLSSVVTVPSSNFGTQTYTCNVDHKPSNTKVDKTV

SEQ ID NO: 239 - protein, 221 aa, Artificial Sequence
  Synthetic polypeptide representing artificial human antibody VH chain
QITLKESGPTLLKPTQTLTLTCNFSGFSLTTYGVGVAWIRQPPGKALEWLALIYWDDDKRYSPSLKSRLTVTKDTSKNQVVLTMTNMDPVDTATYYCAHRGGKNPRYWYFDLWGRGTLVTVSSASTKGPSVFPLAPSSKSTSGGTAALGCLVKDYFPEPVTVSWNSGALTSGVHTFPAVLQSSGLYSLSSVVTVPSSSLGTQTYICNVNHKPSNTKVDKKV

SEQ ID NO: 240 - protein, 218 aa, Artificial Sequence
  Synthetic polypeptide representing artificial human antibody VH chain
EVQLVESGGGLVKPRGSLRLSCAASGFTFSAYGMNWVRQAPGKGLEWVSSISGDSRDIYYGASMKGRFTISRDNAKSSLYLQMNSLRAEDTAVYYCARGEGGELWAFDYWGLGVLVTVSSASTKGPSVFPLAPSSKSTSGGTAALGCLVKDYFPEPVTVSWNSGALTSGVHTFPAVLQSSGLYSLSSVVTVPSSSLGTQTYICNVNHKPSNTKVDKKA

SEQ ID NO: 241 - protein, 219 aa, Artificial Sequence
  Synthetic polypeptide representing artificial human antibody VH chain
PVQLVQSGAEVKKPGSSVQVSCKGSGGTFSEYGISWLRQAPGQGLEWIGGIIPVLGIPNYAQKFRGRVTITADESTGSAYMEVSSLRSEDTAVYYCAREGLRLARGWFHPWGQGTLVTVTSASTKGPSVFPLAPSSKSTSGGTAALGCLVKDYFPEPVTVSWNSGALTSGVHTFPAVLQSSGLYSLSSVVTVPSSSLGTQTYICNVNHKPSNTKVDKSE

SEQ ID NO: 242 - protein, 120 aa, Artificial Sequence
  Synthetic polypeptide representing artificial human antibody VH chain
QVQLQESGPGLVKPSETLSLICTVSGASVNSGTHFWSWIRQPPGKGLEWIGYVYYSGNTNYNPSLKSRVAISVDTSKNQFSLKLTSVTSADTAVYYCARDFDDGYDIRYWGQGTRVSVSS

SEQ ID NO: 243 - protein, 218 aa, Artificial Sequence
  Synthetic polypeptide representing artificial human antibody VH chain
VVQLVESGGGLVQPGGSLRLSCSASGFTFSSYAMHWVRQAPGKGLEYVSAISSNGGSTYYADSVKGRFTISRDNSKNTLYLQMSSLRAEDTAVYYCVKSPVAANDAFDIWGQGTMVTVSSASTKGPSVFPLAPSSKSTSGGTAALGCLVKDYFPEPVTVSWNSGALTSGVHTFPAVLQSSGLYSLSSVVTVPSSSLGTQTYICNVNHKPSNTKVDKSV

SEQ ID NO: 244 - protein, 219 aa, Artificial Sequence
  Synthetic polypeptide representing artificial human antibody VH chain
CEVQLVESGGGLVQPGGSLRLSCVASGFTFSSYSMNWVRQAPGKGLKWVSYISSSRSTIYNADSVKGRFTISRDNAKKSLYLQMNSLRAEDTAVYYCARVSVAAPTCLDYWGQGTLVTVSSASTKGPSVFPLAPSSKSTSGGTAALGCLVKDYFPEPVTVSWNSGALTSGVHTFPAVLQSSGLYSLSSVVTVPSSSLGTQTYICNVNHKPSNTKVDKKV

SEQ ID NO: 245 - protein, 221 aa, Artificial Sequence
  Synthetic polypeptide representing artificial human antibody VH chain
QLQLQESGPGLVKPSETLSLTCTVAGDSISRSNYYWAWIRQPPGKGLEWIGSIIHTGTTYHNPSLRSRGTILVDTSKNQFSLKLSSVTAADTGLYYCARHSGHDQLPLDFDNWGQGTLVTVSSASTKGPSVFPLAPSSKSTSGGTAALGCLVKDYFPEPVTVSWNSGALTSGVHTFPAVLQSSGLYSLSSVVTVPSSSLGTQTYICNVNHKPSNTKVDKSE

SEQ ID NO: 246 - protein, 116 aa, Artificial Sequence
  Synthetic polypeptide representing artificial human antibody VH chain
EVQLVESGGGLVQPGGSLRLSCAASGFTFSKFWMHWVRQAPGKGLVWLSRINTDGTVTTYADSVKGRFTISRDNAKSTLYLQMNSLRVEDTAVYYCAGGGSQVDFWGQGTLVTVSS

SEQ ID NO: 247 - protein, 223 aa, Artificial Sequence
  Synthetic polypeptide representing artificial human antibody VH chain
QITLKESGPTLVKPTQTLTLTCTFSGFSLTTTGVGVGWIRQPPGKALEWLALIYWDDDKRYSPSLKSRLIITKDTSKNQVVLTMTNMDPVDTATYYCAHRFGRGVSYYYYGMDVWGQGTTVTVSSASTKGPSVFPLAPSSKSTSGGTAALGCLVKDYFPEPVTVSWNSGALTSGVHTFPAVLQSSGLYSLSSVVTVPSSSLGTQTYICNVNHKPSNTKVDKKV

SEQ ID NO: 248 - protein, 217 aa, Artificial Sequence
  Synthetic polypeptide representing artificial human antibody VH chain
QVQLVESGGGVVQPGRSLRLSCAASGFIFSSYGMHWVRQAPGKGLEWVAVISYDGSNKYYADSVKGRFTISRDKSKNTLHLQMNSLRAEDTAVYYCAKDSGSNDDMDVWGKGTTVTVSSASTKGPSVFPLAPSSKSTSGGTAALGCLVKDYFPEPVTVSWNSGALTSGVHTFPAVLQSSGLYSLSSVVTVPSSSLGTQTYICNVNHKPSNTKVDKSE

SEQ ID NO: 249 - protein, 219 aa, Artificial Sequence
  Synthetic polypeptide representing artificial human antibody VH chain
CEVQLVESGGGLVQPGGSLRLSCAASGFTFSSYEMNWVRQAPGKGLEWVSYISSSGSTIYYADSVKGRFTISRDNAKNSLYLQMNSLRAEDTAVYYCARRGFYYYYGMDVWGQGTTVTVSSASTKGPSVFPLAPSSKSTSGGTAALGCLVKDYFPEPVTVSWNSGALTSGVHTFPAVLQSSGLYSLSSVVTVPSSSLGTQTYICNVNHKPSNTKVDKSE

SEQ ID NO: 250 - protein, 216 aa, Artificial Sequence
  Synthetic polypeptide representing artificial human antibody VH chain
CEVQLVESGGGLVQPGGSLRLSCAASGFTFSSYSMNWVRQAPGKGLEWVSYISSSSSTIYYADSVKGRFTISRDNAKNSLYLQMNSLRAEDTAVYYCASLLGGDPDYWGQGTLVTVSSASTKGPSVFPLAPSSKSTSGGTAALGCLVKDYFPEPVTVSWNSGALTSGVHTFPAVLQSSGLYSLSSVVTVPSSSLGTQTYICNVNHKPSNTKVDKKV

SEQ ID NO: 251 - protein, 226 aa, Artificial Sequence
  Synthetic polypeptide representing artificial human antibody VH chain
PVTLRESGPALVKPTQTLTLTCTFSGFSLSTSGMCVSWIRQPPGKALEWLARIDWDDDKYYSTSLKTRLTISKDTSKNQVVLTMTNMDPVDTATYYCARMQIVATTQTYYYYYGMDVWGQGTTVTVSSASTKGPSVFPLAPSSKSTSGGTAALGCLVKDYFPEPVTVSWNSGALTSGVHTFPAVLQSSGLYSLSSVVTVPSSSLGTQTYICNVNHKPSNTKVDKSE

SEQ ID NO: 252 - protein, 218 aa, Artificial Sequence
  Synthetic polypeptide representing artificial human antibody VH chain
EVQLVESGGGLVQPGGSLRLSCAASGFTFSSYWMTWVRQAPGKGLEWVANIKQDGSEKYYVDSVKGRFTISRDNSKNSLYLQMNSLRAEDTAVYYCARAGYDLFGWFDPWGQGTLVTVSSASTKGPSVFPLAPSSKSTSGGTAALGCLVKDYFPEPVTVSWNSGALTSGVHTFPAVLQSSGLYSLSSVVTVPSSSLGTQTYICNVNHKPSNTKVDKKL

SEQ ID NO: 253 - protein, 125 aa, Artificial Sequence
  Synthetic polypeptide representing artificial human antibody VH chain
EVQLLESGGGLVQPGGSLRLSCVASGFTFASYGMAWVRQAPGQGLTWICFVGSGDTTHYAESVKGRFTCSRDNSNNTLYLHMSGLRGADTAKYYCAKPNSPFTGSGSFHNYFDYWGQGALVIVSS

SEQ ID NO: 254 - protein, 113 aa, Artificial Sequence
  Synthetic polypeptide representing artificial human antibody VH chain
EVQVVESGGGLGQPGGSLRLSCAASGFTFSSYSMNWVRQAPGKGLEWVSYISSSSSTKYYADSVKGRFTISRDNAKKSLYLQMNSLRDEDTAVYYCASPVRPWGQGTLVTVSS

SEQ ID NO: 255 - protein, 226 aa, Artificial Sequence
  Synthetic polypeptide representing artificial human antibody VH chain
QVQLVQSGAEMKKPGTSVKVSCRTSGYIFTGSFMHWVRQAPAQGLEWMGWINPKTGATYYTEKFKGRVTLTRDTSINTAYMEMTSLRSDDTAVYYCARGFCDLPACYPVPQYNWFDPWGQGTLVTVSSASTKGPSVFPLAPSSKSTSGGTAALGCLVKDYFPEPVTVSWNSGALTSGVHTFPAVLQSSGLYSLSSVVTVPSSSLGTQTYICNVNHKPSNTKVDKRV

SEQ ID NO: 256 - protein, 219 aa, Artificial Sequence
  Synthetic polypeptide representing artificial human antibody VH chain
PVQLQESGPGLVKPSQTLSLTCTVSGGSISSGTYYWSWIRQPAGKGLEWIGRIYASGSTNYNPSLKSRVTISVDTSKNQFSLKLTSVTAADTAVYYCARYSGSYPLGFDYWGQGTLVTVSSASTKGPSVFPLAPSSKSTSGGTAALGCLVKDYFPEPVTVSWNSGALTSGVHTFPAVLQSSGLYSLSSVVTVPSSSLGTQTYICNVNHKPSNTKVDKKV

SEQ ID NO: 257 - protein, 216 aa, Artificial Sequence
  Synthetic polypeptide representing artificial human antibody VH chain
GAEVQLVQSGAEVKKPGQSLKISCKGSGYSFTNYWIGWVRQMPGKGLEWMGIIYPGDSDTRYSPSFQGQVTISADKSISTAYLQWSSLKASDTAMYYCARHEGAFDIWGQGTMVTVSSASTKGPSVFPLAPSSKSTSGGTAALGCLVKDYFPEPVTVSWNSGALTSGVHTFPAVLQSSGLYSLSSVVTVPSSSLGTQTYICNVNHKPSNTKVDKKV

SEQ ID NO: 258 - protein, 121 aa, Artificial Sequence
  Synthetic polypeptide representing artificial human antibody VH chain
VVQLVESGGGLVKPGGSLRLSCAASGFTFSNAWMSWVRQAPGKGLEWVGRIKSKTDGGTTDYTAPVKGRFTISRDDSKNTLYLQMNSLKTEDTAVYYCTTDLAVTTRFDYWGQGTLVTVSS

SEQ ID NO: 259 - protein, 216 aa, Artificial Sequence
  Synthetic polypeptide representing artificial human antibody VH chain
QVQLVESGGGVVQPGRSLRLSCAASGFPFSTYALHWVRQAPGKGLEWVAVISKDGNSKSSAESVKGRFTISRDKSRNTLYLQMNSLRPEDTAVYYCARSTRTDALDVWGQGTTVTVSSASTKGPSVFPLAPSSKSTSGGTAALGCLVKDYFPEPVTVSWNSGALTSGVHTFPAVLQSSGLYSLSSVVTVPSSSLGTQTYICNVNHKPSNTKVDKRV

SEQ ID NO: 260 - protein, 220 aa, Artificial Sequence
  Synthetic polypeptide representing artificial human antibody VH chain
EVQLVESGGGLVQPGGSLKLSCAASGFSFSGSSVHWVRQASGKGLEWVGRIRSKTKNYATAYAASVKGRFTISRDDSKNTAFLQMRSLKAEDTAVYYCAKNDEMDFKGYDYWGQGTLVTVSSASTKGPSVFPLAPSSKSTSGGTAALGCLVKDYFPEPVTVSWNSGALTSGVHTFPAVLQSSGLYSLSSVVTVPSSSLGTQTYICNVNHKPSNTKVDKKV

SEQ ID NO: 261 - protein, 213 aa, Artificial Sequence
  Synthetic polypeptide representing artificial human antibody VH chain
QVQLQESGPGLVKPSETLSLTCTVSGGSISSYYWSWIRQPAGKGLEWIGRIYTSGSTNYNPSLKSRVTMSVDTSKNQFSLKMSSVTAADTAVYYCARGELLFDHWGQGTLVTVSSASTKGPSVFPLAPSSKSTSGGTAALGCLVKDYFPEPVTVSWNSGALTSGVHTFPAVLQSSGLYSLSSVVTVPSSSLGTQTYICNVNHKPSNTKVDKNV

SEQ ID NO: 262 - protein, 217 aa, Artificial Sequence
  Synthetic polypeptide representing artificial human antibody VH chain
EVQLVESGGGLVQPGRSLRLSCVASGFTFGDYAVNWFRQAPGKGLEWVGFISTKGYDETAEYAASVKGRFTMSRDDSKNIAYLLMDSLKAEDTAMYYCARESTVVLDFWGQGTLVAVSSASTKGPSVFPLAPSSKSTSGGTAALGCLVKDYFPEPVTVSWNSGALTSGVHTFPAVLQSSGLYSLSSVVTVPSSSLGTQTYICNVNHKPSNTKVDKKV

SEQ ID NO: 263 - protein, 217 aa, Artificial Sequence
  Synthetic polypeptide representing artificial human antibody VH chain
QVQLVDSGGGVVQPGGSLRLSCAASGFTLSNYGMNWVRQAPGKGLEWVAFIPYDGSNKYYADSVKGRFTISRDISKNTLYLQMNSLRTEDTAVYYCAKRSTAVGDFDPWGQGTLVTVSSASTKGPSVFPLAPSSKSTSGGTAALGCLVKDYFPEPVTVSWNSGALTSGVHTFPAVLQSSGLYSLSSVVTVPSSSLGTQTYICNVNHKPSNTKVDKKV

SEQ ID NO: 264 - protein, 225 aa, Artificial Sequence
  Synthetic polypeptide representing artificial human antibody VH chain
EVQLVESGGGLVQPGGSLRLSCAASGFSITTHSMNWVRQAPGKGLQWVAYISTSTSTIYYADSVEGRFTISRDKAKNALYLQMDSLRAQDTAVYYCARGPSNWNGGPEHMDVWGKGTTVTVSSASPTSPKVFPLSLDSTPQDGNVVVACLVQGFFPQEPLSVTWSESGQNVTARNFPPSQDASGDLYTTSSQLTLPATQCPDGKSVTCHVKHYTNPSQDVTVPCP

SEQ ID NO: 265 - protein, 211 aa, Artificial Sequence
  Synthetic polypeptide representing artificial human antibody VH chain
VVQLVESGGGLVQPGGSLRLSCAASGFTFSSYEMNWVRQAPGKGLEWVSYISSSGSTIYYADSVKGRFTISRDNAKNSLYLQMNSLRAEDTAVYYCARDFDYWGQGTLVTVSSASTKGPSVFPLAPSSKSTSGGTAALGCLVKDYFPEPVTVSWNSGALTSGVHTFPAVLQSSGLYSLSSVVTVPSSSLGTQTYICNVNHKPSNTKVDKNV

SEQ ID NO: 266 - protein, 219 aa, Artificial Sequence
  Synthetic polypeptide representing artificial human antibody VH chain
VVQLVESGGGLVQPGGSLRLSCAASGFTFSSYSMNWVRQAPGKGLEWVSYISSSSSTIYYADSVKGRFTISRDNAKNSLYLQMNSLRDEDTAVYYCARDPYGSGTVWFDPWGQGTLVTVSSASTKGPSVFPLAPSSKSTSGGTAALGCLVKDYFPEPVTVSWNSGALTSGVHTFPAVLQSSGLYSLSSVVTVPSSSLGTQTYICNVNHKPSNTKVDKNV

SEQ ID NO: 267 - protein, 224 aa, Artificial Sequence
  Synthetic polypeptide representing artificial human antibody VH chain
EAQLVESGGGLIQPGGSLRLSCAASGFSVSSKYMSWVRQAPGKGLEWVSVMYSGGATYYADSVKGRFVISRDSSKNTVFLQMNSLRAEDTAVYYCAKTEYTFLSGSDYYQYGMDVWGQGTTVTVSSASTKGPSVFPLAPSSKSTSGGTAALGCLVKDYFPEPVTVSWNSGALTSGVHTFPAVLQSSGLYSLSSVVTVPSSSLGTQTYICNVNHKPSNTKVDKRV

SEQ ID NO: 268 - protein, 221 aa, Artificial Sequence
  Synthetic polypeptide representing artificial human antibody VH chain
PVQLVQSGAEVKKPGESLKISCKGSGYSFTNYWIGWVRQMPGKGLEWMGIIYPGDSDTRYSPSFQGQVTISADKSISTAYLQWSSLKASDTAMYYCARRGLLRGSNEGRFDYWGQGTLVTVSSASTKGPSVFPLAPSSKSTSGGTAALGCLVKDYFPEPVTVSWNSGALTSGVHTFPAVLQSSGLYSLSSVVTVPSSSLGTQTYICNVNHKPSNTKVDKKV

SEQ ID NO: 269 - protein, 222 aa, Artificial Sequence
  Synthetic polypeptide representing artificial human antibody VH chain
VVQLVESGGDLVQPGGSLKLSCAASGFTFSGSAMHWVRQASGKGLEWVGRIRSKPNSYATAYAVSVKGRFTISRDDSKNTAYLQMNSLKTEDTAVYYCTRRGSAWTDPYYTDVWGKGTTVTVSSASTKGPSVFPLAPSSKSTSGGTAALGCLVKDYFPEPVTVSWNSGALTSGVHTFPAVLQSSGLYSLSSVVTVPSSSLGTQTYICNVNHKPSNTKVDKRE

SEQ ID NO: 270 - protein, 222 aa, Artificial Sequence
  Synthetic polypeptide representing artificial human antibody VH chain
SVQLVESGGGVVQPGRSLRLSCAASGFTFSDYGMHWVRQAPGKGLEWVAVIWYDGSNEYYADSVKGRFTISRDNSKNTVYLQMNSLGAEDTAVYYCARDDVPRGYDYWGQGTLVTVSSGSASAPTLFPLVSCENSPSDTSSVAVGCLAQDFLPDSITFSWKYKNNSDISSTRGFPSVLRGGKYAATSQVLLPSKDVMQGTDEHVVCKVQHPNGNKEKNVPLP

SEQ ID NO: 271 - protein, 218 aa, Artificial Sequence
  Synthetic polypeptide representing artificial human antibody VH chain
SVQLVESGGGVVQPGRSLRLSCAASGYTFNNYGMHWVRQAPGKGLEWVAIIWYDGSNKYYADSVKGRFTISRDNSKNTLYLQMNSLRAEDTAVYYCAREYIVPFYGMDVWGQGTTVTVSSASTKGPSVFPLAPSSKSTSGGTAALGCLVKDYFPEPVTVSWNSGALTSGVHTFPAVLQSSGLYSLSSVVTVPSSSLGTQTYICNVNHKPSNTKVDKKV

SEQ ID NO: 272 - protein, 214 aa, Artificial Sequence
  Synthetic polypeptide representing artificial human antibody VL chain
DIQMTQSPSSLSASVGDRVSITCRASQGVSSYLAWYQKKPGRAPKLLIYSASSLQSGVPSRFSGSGSGTDFTLTITGLQPEDFATYFCQQTNTFPLTFGGGTKVEIKRTVAAPSVFIFPPSDEQLKSGTASVVCLLNNFYPREAKVQWKVDNALQSGNSQESVTEQDSKDSTYSLSSTLTLSKADYEKHKLYACEVTHQGLSSPVTKSFNRGEC

SEQ ID NO: 273 - protein, 214 aa, Artificial Sequence
  Synthetic polypeptide representing artificial human antibody VL chain
DIQMTQSPSSLSASVGDRVTITCRASQSIGSYLNWYQQKPGKAPKLLIYAASSLQSGVPSRFSGSGSGTDFTLTISSLQPEDFATYYCQQSYSTPPRFGQGTKLEIKRTVAAPSVFIFPPSDEQLKSGTASVVCLLNNFYPREAKVQWKVDNALQSGNSQESVTEQDSKDSTYSLSSTLTLSKADYEKHKVYACEVTHQGLSSPVTKSFNRGEC

SEQ ID NO: 274 - protein, 214 aa, Artificial Sequence
  Synthetic polypeptide representing artificial human antibody VL chain
DIQMTQSPSYVSASVGDRVTITCRASQGIDVWLAWYQQKPGKAPKLLIYTASSLQSGVPSRFSGSGGGTEFTLTISSLQPEDFATYYCQQSNSFPGTFGPGTKVDVKRTVAAPSVFIFPPSDEQLKSGTASVVCLLNNFYPREAKVQWKVDNALQSGNSQESVTEQDSKDSTYSLSSTLTLSKADYEKHKVYACEVTHQGLSSPVTKSFNRGEC

SEQ ID NO: 275 - protein, 110 aa, Artificial Sequence
  Synthetic polypeptide representing artificial human antibody VL chain
PSVLTQPPSASGTPGQRVTISCSGSSSNIGSNYVYWYQQLPGTAPKFLIYRNNQRPSGVPDRFSGSKSGTSASLAISGLRSEDEADYYCAAWEDSLSGPVFGGGTKLTVL

SEQ ID NO: 276 - protein, 212 aa, Artificial Sequence
  Synthetic polypeptide representing artificial human antibody VL chain
SSELTQDPAVSVALGQTVRITCQGDSLRNYYASWFQQKPGQAPVLVIFGKNYRPSGIPDRFSGSNSGNTASLTITGAQAEDEADYYCNSRDRSGYVFGSGTKVTVLGQPKANPTVTLFPPSSEELQANKATLVCLISDFYPGAVTVAWKADGSPVKAGVETTKPSKQSNNKYAASSYLSLTPEQWKSHRSYSCQVTHEGSTVEKTVAPTECS

SEQ ID NO: 277 - protein, 214 aa, Artificial Sequence
  Synthetic polypeptide representing artificial human antibody VL chain
LYVLTQPPSVSVAPGTTAWISCGGNNIGIKSVHWYQQKPGQAPLLVISYDSDRPSVIPERFSVSNSGNTVTLTISRVEAGDEADYYCQVWDNGHSHWVFGGGTKLTVLGQPKAAPSVTLFPPSSEELQANKATLVCLISDFYPGAVTVAWKADSSPVKAGVETTTPSKQSNNKYAASSYLSLTPEQWKSHRSYSCQVTHEGSTVEKTVAPTECS

SEQ ID NO: 278 - protein, 106 aa, Artificial Sequence
  Synthetic polypeptide representing artificial human antibody VL chain
DIQMTQSPSSLSASVGDRVTITCRASQSISSYLNWYQQKPGRAPRLLIYAASRLQIGVPSRFSGSGSGTDFTLTISSLQPEDFATYYCQQSYRMPCSFGQGTKLEI

SEQ ID NO: 279 - protein, 216 aa, Artificial Sequence
  Synthetic polypeptide representing artificial human antibody VL chain
EIVLTQSPGTLSLSPGERATLSCRASQSVSSSYLAWYQQKPGQAPRLLIYDASSRATGIPDRFSGSGSGTDFTLTISRLEPEDFAVYYCQQYGSSPPITFGQGTRLEIKRTVAAPSVFIFPPSDEQLKSGTASVVCLLNNFYPREAKVQWKVDNALQSGNSQESVTEQDSKDSTYSLSSTLTLSKADYEKHKLYACEVTHQGLSSPVTKSFNRGEC

SEQ ID NO: 280 - protein, 110 aa, Artificial Sequence
  Synthetic polypeptide representing artificial human antibody VL chain
HFMLTQPHSVSESPGKTVTISCTRSSGNIASYYVQWYQQRPGSAPTTVIYEDDQRPSGVPDRFSASIDSSSNSASLTISGLKTEDEADYYCQSYDTTNVIFGGGTKLTVL

SEQ ID NO: 281 - protein, 215 aa, Artificial Sequence
  Synthetic polypeptide representing artificial human antibody VL chain
EIVLTQSPGTLSLSPGERATLSCRASQSVSSSYLAWYQQKPGQAPRLLIFGASTRASGIPDRFSGRGSGTEFTLTISRLEPEDFAVYYCQQYDSSPFTFGPGTKVEIKRTVAAPSVFIFPPSDEQLKSGTASVVCLLNNFYPREAKVQWKVDNALQSGNSQESVTEQDSKDSTYSLSSTLTLSKADYEKHKLYACEVTHQGLSSPVTKSFNRGEC

SEQ ID NO: 282 - protein, 215 aa, Artificial Sequence
  Synthetic polypeptide representing artificial human antibody VL chain
PSVLTQPPSVSAAPGQNVTISCSGSSSNIENNDVSWYQQLPGTAPKVIIYENNQRPSGIPDRFSGSKSGTSATLGITGLQTGDEADYYCGTWDDNLSAVFGGGTKLTVLGQPKAAPSVTLFPPSSEELQANKATLVCLISDFYPGAVTVAWKADSSPVKAGVETTTPSKQSNNKYAASSYLSLTPEQWKSHRSYSCQVTHEGSTVEKTVAPTECS

SEQ ID NO: 283 - protein, 112 aa, Artificial Sequence
  Synthetic polypeptide representing artificial human antibody VL chain
DVVMTQSPLSLPVTLGQPASISCRSSQSLVHSDGNTYLNWFQQRPGQSPRRLIYMVSNRDSGVPDRFSGSGSGTDFTLKISRVEAEDVGVYYCLQGTHWPPTIGQGTKVEIE

SEQ ID NO: 284 - protein, 216 aa, Artificial Sequence
  Synthetic polypeptide representing artificial human antibody VL chain
PSGLTQPPSASGTPGQRVTMSCSGSSSNIGRNYVYWYQQLPGAAPKLLIYRDNQRPSGVPDRFSGSKSGTSASLAISGLRSEDEADYYCAAWDDNVSGPGFGAGTRLTVLGQPKANPTVTLFPPSSEELQANKATLVCLISDFYPGAVTVAWKADGSPVKAGVETTKPSKQSNNKYAASSYLSLTPEQWKSHRSYSCQVTHEGSTVEKTVAPTECS

SEQ ID NO: 285 - protein, 216 aa, Artificial Sequence
  Synthetic polypeptide representing artificial human antibody VL chain
PAVLTQSPSASGTPGQRVTISCFGSISNIGSNPVNWYQQVPGAAPKLLIYSSSQRPSGVPDRFSGSKSGTSASLAISGLQSEDEADYYCATWDDSLNGPVFGGGTKLTVLGQPKAAPSVTLFPPSSEELQANKATLVCLISDFYPGAVTVAWKADSSPVKAGVETTTPSKQSNNKYAASSYLSLTPEQWKSHRSYSCQVTHEGSTVEKTVAPTECS

SEQ ID NO: 286 - protein, 213 aa, Artificial Sequence
  Synthetic polypeptide representing artificial human antibody VL chain
ETVMTQSPATLSVSPGDRATLSCRASQNVNFNLAWYQQKPGQAPRLLIYDASTRATGIPARFSGSASGTEFTLTINSLQSEDFAVYYCQQYNNWWTFGQGTKLEIKRTVAAPSVFIFPPSDEQLKSGTASVVCLLNNFYPREAKVQWKVDNALQSGNSQESVTEQDSKDSTYSLSSTLTLSKADYEKHKVYACEVTHQGLSSPVTKSFNRGEW

SEQ ID NO: 287 - protein, 215 aa, Artificial Sequence
  Synthetic polypeptide representing artificial human antibody VL chain
EIVLTQSPGTLSLSPGERATLSCRASQSVSSSSLAWYQQKPGQAPRLLIYGASSRATGIPDRFSGSGSGTDFTLTISRLEPEDFAVYYCQQYGSFRYTFGQGTKLEIKRTVAAPSVFIFPPSDEQLKSGTASVVCLLNNFYPREAKVQWKVDNALQSGNSQESVTEQDSKDSTYSLSSTLTLSKADYEKHKVYACEVTHQGLSSPVTKSFNRGEW

SEQ ID NO: 288 - protein, 213 aa, Artificial Sequence
  Synthetic polypeptide representing artificial human antibody VL chain
PYELTQPPSVSVSPGQTARITCSGDALPKQYAYWYQQKPGQAPVLVIYKDSERPSGIPERFSGSSSGTTVTLTISGVQAEDEADYYCQSADSSDTYVFGGGTKLTVLGQPKAAPSVTLFPPSSEELQANKATLVCLISDFYPGAVTVAWKADSSPVKAGVETTTPSKQSNNKYAASSYLSLTPEQWKSHRSYSCQVTHEGSTVEKTVAPTECS

SEQ ID NO: 289 - protein, 214 aa, Artificial Sequence
  Synthetic polypeptide representing artificial human antibody VL chain
EIVLTQSPATLSLSPGERATLSCRASQSVSSYLAWYQQKPGQAPRLLIYDASNRATGIPARFSGSGSGTDFTLTISSLEPEDFAVYYCQQRSNWPLTFGGGTKVEIKRTVAAPSVFIFPPSDEQLKSGTASVVCLLNNFYPREAKVQWKVDNALQSGNSQESVTEQDSKDSTYSLSSTLTLSKADYEKHKVYACEVTHQGLSSPVTKSFNRGEW

SEQ ID NO: 290 - protein, 215 aa, Artificial Sequence
  Synthetic polypeptide representing artificial human antibody VL chain
EIVLTQSPATLSLSPGERATLSCRASQSVGSYLAWYQQKPGQAPRLLIYDASNRATGIPARFSGSGSGTDFTLTISSLEPEDFAVYYCQQGSNWLALTFGGGTKVEIKRTVAAPSVFIFPPSDEQLKSGTASVVCLLNNFYPREAKVQWKVDNALQSGNSQESVTEQDSKDSTYSLSSTLTLSKADYEKHKVYACEVTHQGLSSPVTKSFNRGEC

SEQ ID NO: 291 - protein, 213 aa, Artificial Sequence
  Synthetic polypeptide representing artificial human antibody VL chain
IQMTQSPSSLSASVGDRVTITCRASQAIANSLAWYQQRPGKAPKLLIYAASSLESGVPSRFSGSGSGTDYTLTISSLQPEDFATYYCQQYYINPRTFGQGTKVEIKRTVAAPSVFIFPPSDEQLKSGTASVVCLLNNFYPREAKVQWKVDNALQSGNSQESVTEQDSKDSTYSLSSTLTLSKADYEKHKVYACEVTHQGLSSPVTKSFNRGEC

SEQ ID NO: 292 - protein, 220 aa, Artificial Sequence
  Synthetic polypeptide representing artificial human antibody VL chain
GIVMTQSPDSLAVSLGERATINCKSSQSVLYSSNNENYLAWYQQKPGQPPKLLIYWASTRESGVPDRFSGSGSGTDFTLTISSLQAEDVAVYYCQQYYSTPYTFGQGTKLEIKRTVAAPSVFIFPPSDEQLKSGTASVVCLLNNFYPREAKVQWKVDNALQSGNSQESVTEQDSKDSTYSLSSTLTLSKADYEKHKVYACEVTHQGLSSPVTKSFNRGEW

SEQ ID NO: 293 - protein, 106 aa, Artificial Sequence
  Synthetic polypeptide representing artificial human antibody VL chain
DIQMTQSPSSLSASVGDRVTISCRASHNINTYLNWYQHKPGKAPKIVIYGASSLQSGVPSRFSGSGSGTDFSLTISSLQREDFATYFCQQSFNTVLTFGGGTRVDI

SEQ ID NO: 294 - protein, 217 aa, Artificial Sequence
  Synthetic polypeptide representing artificial human antibody VL chain
QSALTQPASVSGSPGQSITISCTGTSSDVGGYNYVSWYQQHPGKAPKLMIYEVSNRPSGVSNRFSGSKSGNTASLTISGLQAEDEADYHCSSYTITSTLWVFGGGTKLTVLGQPKAAPSVTLFPPSSEELQANKATLVCLISDFYPGAVTVAWKADSSPVKAGVETTTPSKQSNNKYAASSYLSLTPEQWKSHKSYSCQVTHEGSTVEKTVAPTECS

SEQ ID NO: 295 - protein, 216 aa, Artificial Sequence
  Synthetic polypeptide representing artificial human antibody VL chain
QSVLTQPPSASGTPGQGVTISCSGTSANIGKNYVSWYQHLPGTAPRLLIYRIDQRPSGVPDRFSGSKSGTSASLAISGLRPEDEADYYCAAWDDSLSGPVFGGGTKLTVLGQPKAAPSVTLFPPSSEELQANKATLVCLISDFYPGAVTVAWKADSSPVKAGVETTTPSKQSNNKYAASSYLSLTPEQWKSHRSYSCQVTHEGSTVEKTVAPTECS

SEQ ID NO: 296 - protein, 214 aa, Artificial Sequence
  Synthetic polypeptide representing artificial human antibody VL chain
DLQMTQSPSSLSASIGDRVTITCRASQSISTYFNWYQQKPGKAPKLLIYAASSLQSGVPSRFSGSGSGTDFTLTITSLQPEDFATYYCQQTYSNPWTFGQGTKVDFKRTVAAPSVFIFPPSDEQLKSGTASVVCLLNNFYPREAKVQWKVDNALQSGNSQESVTEQDSKDSTYSLSSTLTLSKADYEKHKVYACEVTHQGLSSPVTKSFNRGEW

SEQ ID NO: 297 - protein, 214 aa, Artificial Sequence
  Synthetic polypeptide representing artificial human antibody VL chain
DIQMTQSPSSLSASVGDRVTITCRASQSIKNYVNWYQQKPGEAPNLLIFAASNLQSGVPSRFTGSGSGTDFSLTISSLQPEDFAAYYCQQTYSHPRTFGQGTRVEIKRTVAAPSVFIFPPSDEQLKSGTASVVCLLNNFYPREAKVQWKVDNALQSGNSQESVTEQDSKDSTYSLSSTLTLSKADYEKHKLYACEVTHQGLSSPVTKSFNRGEC

SEQ ID NO: 298 - protein, 217 aa, Artificial Sequence
  Synthetic polypeptide representing artificial human antibody VL chain
QSVLTQPPSVSGAPGQRVTISCTGSSSNIGAGYDVHWYQHLPGTAPKLLIYGDSHRPSGVPDGFSGSKSGTSASLAITGLQAEDEADYYCQSYDSSLSGYVFGTGTKVTVLGQPKANPTVTLFPPSSEELQANKATLVCLISDFYPGAVTVAWKADGSPVKAGVETTKPSKQSNNKYAASSYLSLTPEQWKSHRSYSCQVTHEGSTVEKTVAPTECS

SEQ ID NO: 299 - protein, 108 aa, Artificial Sequence
  Synthetic polypeptide representing artificial human antibody VL chain
SYVLTQPPSVSVAPGQTARIACGGNNIGSKTVHWYQQKPGQAPMVVVYDDSDRPSGIPERFSGSNSGNTATLTISRVEAGDEADYYCQVWDSSSDHYVLGTGTKVTVL

SEQ ID NO: 300 - protein, 214 aa, Artificial Sequence
  Synthetic polypeptide representing artificial human antibody VL chain
DIQMTQSPSSVSASVGDRVTITCRASQDISNWLAWYLQKPGKAPKLLIYAASSLQSGVPSRFSGSGSGTDFTLTISSLQPEDFATYYCQQTSSFPRTFGPGTKVDIKRTVAAPSVFIFPPSDEQLKSGTASVVCLLNNFYPREAKVQWKVDNALQSGNSQESVTEQDSKDSTYSLSSTLTLSKADYEKHKVYACEVTHQGLSSPVTKSFNRGEC

SEQ ID NO: 301 - protein, 213 aa, Artificial Sequence
  Synthetic polypeptide representing artificial human antibody VL chain
PYELTQPPSVSVSPGQTARITCSGDALPNENAFWYQQKPGQAPVLVIYEDIKRPSGIPERFSGSSSGTTVTLTISGVQAEDEADYYCQSVDITSTWVFGGGTKLTVLGQPKAAPSVTLFPPSSEELQANKATLVCLISDFYPGAVTVAWKADSSPVKAGVETTTPSKQSNNKYAASSYLSLTPEQWKSHKSYSCQVTHEGSTVEKTVAPTECS

SEQ ID NO: 302 - protein, 217 aa, Artificial Sequence
  Synthetic polypeptide representing artificial human antibody VL chain
QSALTQPPSVSGSPGQSVTISCTGTTSDIGSYDRVSWYQKPPGTAPKLIIYEVSHRPSGVPDRFSGSKSGNTASLTISGLQAEDEADYYCSSYISSLTYVLFGGGTKLTVLGQPKAAPSVTLFPPSSEELQANKATLVCLISDFYPGAVTVAWKADSSPVKAGVETTTPSKQSNNKYAASSYLSLTPEQWKSHRSYSCQVTHEGSTVEKTVAPTECS

SEQ ID NO: 303 - protein, 216 aa, Artificial Sequence
  Synthetic polypeptide representing artificial human antibody VL chain
PSVLTQPPSVSAAPGQKVTISCSGSSSNIGNNYVSWYQQLPGTAPKLLIYDNNKRPSGIRDRFSGSKSGTSATLGITGLQTGDEADYYCGTWDSSLSVGVFGGGTKLTVLGQPKAAPSVTLFPPSSEELQANKATLVCLISDFYPGAVTVAWKADSSPVKAGVETTTPSKQSNNKYAASSYLSLTPEQWKSHKSYSCQVTHEGSTVEKTVAPTECS

SEQ ID NO: 304 - protein, 219 aa, Artificial Sequence
  Synthetic polypeptide representing artificial human antibody VL chain
GVVMTQSPLSLPVTLGQPASISCRSSQSLVYSDGNTYLNWFQQRPGQSPRRLIYKVSNRDSGVPDRFSGSGSGTDFTLKISRVEAEDVGVYYCMQGTHWPITFGQGTRLEIKRTVAAPSVFIFPPSDEQLKSGTASVVCLLNNFYPREAKVQWKVDNALQSGNSQESVTEQDSKDSTYSLSSTLTLSKADYEKHKVYACEVTHQGLSSPVTKSFNRGEW

SEQ ID NO: 305 - protein, 108 aa, Artificial Sequence
  Synthetic polypeptide representing artificial human antibody VL chain
EIVLTQSPGTLSLSPGERATLSCRASQSIRSSYLAWYQQKPGQAPRLLIYGASSRATGIPDRFSGSGSGTDFTLTISRLEPEDFAVYYCQQYDSSSWTFGQGTKVEIK

SEQ ID NO: 306 - protein, 217 aa, Artificial Sequence
  Synthetic polypeptide representing artificial human antibody VL chain
PSVLTQPPSVSGAPGQRVTISCSGSTSNIGAGYDVHWYQQFPGTAPKLLIYGNIFRPSGVPDRFSGSKSGTSASLAITGLQAEDEAAYYCQSYDSSLRGVVFGGGTYLTVLGQPKAAPSVTLFPPSSEELQANKATLVCLISDFYPGAVTVAWKADSSPVKAGVETTTPSKQSNNKYAASSYLSLTPEQWKSHRSYSCQVTHEGSTVEKTVAPTECS

SEQ ID NO: 307 - protein, 214 aa, Artificial Sequence
  Synthetic polypeptide representing artificial human antibody VL chain
DIQMTQSPSSLSASVGDRVTITCRASQSISSYLNWYQQKPGKAPKLLIYAASSLQSGVPSRFSGSGSGTDFTLTISSLQPEDFATYYCQQSYSTPRTFGQGTKVEIKRTVAAPSVFIFPPSDEQLKSGTASVVCLLNNFYPREAKVQWKVDNALQSGNSQESVTEQDSKDSTYSLSSTLTLSKADYEKHKVYACEVTHQGLSSPVTKSFNRGEW

SEQ ID NO: 308 - protein, 220 aa, Artificial Sequence
  Synthetic polypeptide representing artificial human antibody VL chain
GIVMTQSPDSLAVSLGERATINCKSSQNVLYSSNNKNYLGWYQQKPGQPPKLLIYWASTRESGVPDRFSGSGSGTDFTLTINSLQAEDVAVYYCQQYYSTPWTFGQGTKVEIKRTVAAPSVFIFPPSDEQLKSGTASVVCLLNNFYPREAKVQWKVDNALQSGNSQESVTEQDSKDSTYSLSSTLTLSKADYEKHKVYACEVTHQGLSSPVTKSFNRGEW

SEQ ID NO: 309 - protein, 219 aa, Artificial Sequence
  Synthetic polypeptide representing artificial human antibody VL chain
PSVLTQPPSVSGAPGQKVTISCTGSSSNIGAGYDVHWYQQLPGTAPKLLIYRNNNRPSGVPDRFSGSKSGTSASLAITGLQTEDEADYYCQSYDSGLSGSKVVFGGGTKLTVLGQPKAAPSVTLFPPSSEELQANKATLVCLISDFYPGAVTVAWKADSSPVKAGVETTTPSKQSNNKYAASSYLSLTPEQWKSHRSYSCQVTHEGSTVEKTVAPTECS

SEQ ID NO: 310 - protein, 216 aa, Artificial Sequence
  Synthetic polypeptide representing artificial human antibody VL chain
HFMLTQPHSVSESPGKTVTISCTRSSGSIASSYVQWYQQRPGSSPTTMIYEDKKRPSGVPDRFSGSIDSSSNSASLTISGLKTEDEADYYCQSYDLSTWVFGGGTKLTVLGQPKAAPSVTLFPPSSEELQANKATLVCLISDFYPGAVTVAWKADSSPVKAGVETTTPSKQSNNKYAASSYLSLTPEQWKSHRSYSCQVTHEGSTVEKTVAPTECS

SEQ ID NO: 311 - protein, 214 aa, Artificial Sequence
  Synthetic polypeptide representing artificial human antibody VL chain
DIQMTQSPFSLSASVGDRVTITCRASQSISSYLNWYQQKPGKAPKLLIYAASSLQSGVPSRFSGSGSGTDFTLTISSLQPEDFATYYCHQSYSTSLTFGGGTKVEIKRTVAAPSVFIFPPSDEQLKSGTASVVCLLNNFYPREAKVQWKVDNALQSGNSQESVTEQDSKDSTYSLSSTLTLSKADYEKHKVYACEVTHQGLSSPVTKSFNRGEC

SEQ ID NO: 312 - protein, 214 aa, Artificial Sequence
  Synthetic polypeptide representing artificial human antibody VL chain
SYVLTQPPSVSVAPGKTARITCGGNNIGSKSVHWYQQKPGQAPVLVIYYDSDRPSGIPERFSGSNSGNTATLTISRVEAGDEADYYCQVWDSSSDHWVFGGGTKLTVLGQPKAAPSVTLFPPSSEELQANKATLVCLISDFYPGAVTVAWKADSSPVKAGVETTTPSKQSNNKYAASSYLSLTPEQWKSHKSYSCQVTHEGSTVEKTVAPTECS

SEQ ID NO: 313 - protein, 216 aa, Artificial Sequence
  Synthetic polypeptide representing artificial human antibody VL chain
QSALTQPASVSGSPGQSITISCTGTSSDVGGYNYVSWYQQHPGKAPKLMIYDVSNRPSGVSNRFSGSKSGNTASLTISGLQAEDEADYYCSSYTSSSTQVFGGGTKLTVLGQPKAAPSVTLFPPSSEELQANKATLVCLISDFYPGAVTVAWKADSSPVKAGVETTTPSKQSNNKYAASSYLSLTPEQWKSHRSYSCQVTHEGSTVEKTVAPTECS

SEQ ID NO: 314 - protein, 214 aa, Artificial Sequence
  Synthetic polypeptide representing artificial human antibody VL chain
DIQMTQSPSSLSASVGDRVTITCRASQSISSYLNWYQQKPGKAPKLLIYAASSLQSGVPSRFSGSGSGTDFTLTISSLQPEDFATYYCQQSYSTPKTFGQGTKVEIKRTVAAPSVFIFPPSDEQLKSGTASVVCLLNNFYPREAKVQWKVDNALQSGNSQESVTEQDSKDSTYSLSSTLTLSKADYEKHKVYACEVTHQGLSSPVTKSFNRGEW

SEQ ID NO: 315 - protein, 108 aa, Artificial Sequence
  Synthetic polypeptide representing artificial human antibody VL chain
AIQLTQSPSSLSASVGDRVILTCRASQGINSALAWYQQKPGKPPKLLIYAASSLESGVPSRFSGSGSGTDFTLTISNLQPEDFATYFCQQFNTYPLYTFGQGTKLDIT

SEQ ID NO: 316 - protein, 109 aa, Artificial Sequence
  Synthetic polypeptide representing artificial human antibody VL chain
VSSELTQDPAVSVALGQTVRITCQGDSLRRYYASWYQQKAGQAPILVIYGENNRPSGIPDRFSGSGSGNTASLTITGAQAEDEADYYCDSRDSSGNLVVFGGGTKLTVL

SEQ ID NO: 317 - protein, 214 aa, Artificial Sequence
  Synthetic polypeptide representing artificial human antibody VL chain
DIQMTQSPSSVPASVGDRVTITCRASQGIRNWLAWYRQRPGKAPELLIYAASNLQFGVPSRFSGSGSGTDFALTISSVQPEDFATYYCQQTNSFPRTFGPGTKVDIKRTVAAPSVFIFPPSDEQLKSGTASVVCLLNNFYPREAKVQWKVDNALQSGNSQESVTEQDSKDSTYSLSSTLTLSKADYEKHKVYACEVTHQGLSSPVTKSFNRGEW

SEQ ID NO: 318 - protein, 215 aa, Artificial Sequence
  Synthetic polypeptide representing artificial human antibody VL chain
DIQMTQSPSSLSASVGDRITITCRASQSVGTYLSWFQQKPGKAPKLLIYAASSLQSGVPSRFSGSGSGTDFTLTISSLQPEDFATYFCQQSYSVPPWTFGQGTKVEIKRTVAAPSVFIFPPSDEQLKSGTASVVCLLNNFYPREAKVQWKVDNALQSGNSQESVTEQDSKDSTYSLSSTLTLSKADYEKHKVYACEVTHQGLSSPVTKSFNRGEW

SEQ ID NO: 319 - protein, 216 aa, Artificial Sequence
  Synthetic polypeptide representing artificial human antibody VL chain
EVVLTQSPGTLSLSPGERATLSCRASQSVSSNYLAWYQQKLGQAPRLLIYGASSRATGIPDRFSGSGSGTDFTLTISRLEAEDFAVYYCQQYGSSPRYTFGQGTKVEIRRTVAAPSVFIFPPSDEQLKSGTASVVCLLNNFYPREAKVQWKVDNALQSGNSQESVTEQDSKDSTYSLSSTLTLSKADYEKHKLYACEVTHQGLSSPVTKSFNRGEW

SEQ ID NO: 320 - protein, 214 aa, Artificial Sequence
  Synthetic polypeptide representing artificial human antibody VL chain
EIVLTQSPGTLSLSPGERATLSCRASQSVSSRYLAWYQQKPGQAPRLLIHGASSRATGIPDRFSGSGSGTDFTLTISRLEPEDFAVYYCQQYGSAWTFGQGTKVEIKRTVAAPSVFIFPPSDEQLKSGTASVVCLLNNFYPREAKVQWKVDNALQSGNSQESVTEQDSKDSTYSLSSTLTLSKADYEKHKVYACEVTHQGLSSPVTKSFNRGEW

SEQ ID NO: 321 - protein, 215 aa, Artificial Sequence
  Synthetic polypeptide representing artificial human antibody VL chain
EIVLTQSPATLSLSPGERATLSCRASQSVGSSLAWYQQKPGQAPRLLIFDSSNRATAIPARFTGSGSGTDFTLTISSLEPEDFAVYYCQQRANWPPITFGQGTRLDIRRTVAAPSVFIFPPSDEQLKSGTASVVCLLNNFYPREAKVQWKVDNALQSGNSQESVTEQDSKDSTYSLSSTLTLSKADYEKHKVYACEVTHQGLSSPVTKSFNRGEC

SEQ ID NO: 322 - protein, 214 aa, Artificial Sequence
  Synthetic polypeptide representing artificial human antibody VL chain
DIQMTQSPSTLSASVGDRVTITCRASQSISSWLAWYQQKPGKAPKLVIYKASSLKSGVPSRFSGSGSGTEFTLTISSLQPDDFATYYCQQYNSYPWTFGQGTKVEIKRTVAAPSVFIFPPSDEQLKSGTASVVCLLNNFYPREAKVQWKVDNALQSGNSQESVTEQDSKDSTYSLSSTLTLSKADYEKHKVYACEVTHQGLSSPVTKSFNRGEW

SEQ ID NO: 323 - protein, 215 aa, Artificial Sequence
  Synthetic polypeptide representing artificial human antibody VL chain
PYVLTQPPSVSVAPGKTARITCGGNNIGSKSVHWYQQKPGQAPVLVIYYDSDRPSGIPERFSGSNSGNTATLTISRVEAGDEADYYCQVWDSSSDHYVVFGGGTKLTVLGQPKAAPSVTLFPPSSEELQANKATLVCLISDFYPGAVTVAWKADSSPVKAGVETTTPSKQSNNKYAASSYLSLTPEQWKSHRSYSCQVTHEGSTVEKTVAPTECS

SEQ ID NO: 324 - protein, 108 aa, Artificial Sequence
  Synthetic polypeptide representing artificial human antibody VL chain
EIVLTQSPATLSLSPGERATLSCRASQSVSTYLAWYQQKPGQAPRLLIYDASNRATGIPARFSGSGSGTDFTLTISSLEPEDFAVYYCQQRSNWPPLTFGGGTKVEIE

SEQ ID NO: 325 - protein, 219 aa, Artificial Sequence
  Synthetic polypeptide representing artificial human antibody VL chain
DIVMTQSPLSLPVTPGEPASISCRSSQSLLHSNGYNYLDWYVQKPGQSPQLLIYLGSNRASGVTDRLSGSGSGTDFTLEIGRVEAEDVGVYYCMQALQTPYTFGQGTKLEIRRTVAAPSVFIFPPSDEQLKSGTASVVCLLNNFYPREAKVQWKVDNALQSGNSQESVTEQDSKDSTYSLSSTLTLSKADYEKHKVYACEVTHQGLSSPVTKSFNRGEC

SEQ ID NO: 326 - protein, 213 aa, Artificial Sequence
  Synthetic polypeptide representing artificial human antibody VL chain
DIQMTQSPSTLSASVGDRVTITCRASQSISSWLAWYQQKPGKAPKLLIYKASSLESGVPSRFSGSGSGTEFTLTISSLQPDDFATYYCQQYNSYSTFGQGTKVEIKRTVAAPSVFIFPPSDEQLKSGTASVVCLLNNFYPREAKVQWKVDNALQSGNSQESVTEQDSKDSTYSLSSTLTLSKADYEKHKVYACEVTHQGLSSPVTKSFNRGEW

SEQ ID NO: 327 - protein, 110 aa, Artificial Sequence
  Synthetic polypeptide representing artificial human antibody VL chain
QTVVTQEPSVSVSPGGTVTLTCGLRSGSVSTGNYPSWYQQTPGQAPRTLIYNINTRSSGVPHRFSASIIDNRAALTITGAQSDDESLYYCLLYMGSGISVFGGGTKVTVL

SEQ ID NO: 328 - protein, 216 aa, Artificial Sequence
  Synthetic polypeptide representing artificial human antibody VL chain
EIVLTQSPGTLSSTLGERATLSCRASQSVSSSYLAWYQQKPGQAPRLLIYGASRRATGIPDRFSGSGSGTDFTLTISRLEPEDFAVYYCQHYGASPPWTFGQGTKVEIKRTVAAPSVFIFPPSDEQLKSGTASVVCLLNNFYPREAKVQWKVDNALQSGNSQESVTEQDSKDSTYSLSSTLTLSKADYEKHKVYACEVTHQGLSSPVTKSFNRGEC

SEQ ID NO: 329 - protein, 215 aa, Artificial Sequence
  Synthetic polypeptide representing artificial human antibody VL chain
PYVLTQPPSVSVAPGQTARITCGGNNIGSKSVHWYQQKPGQAPVMVVYADRERPSGIPERLSGSNFGNTATLTISRVEAGDEADYYCQVWDSNNDHREVFGGGTKLTVLGQPKAAPSVTLFPPSSEELQANKATLVCLISDFYPGAVTVAWKADSSPVKAGVETTTPSKQSNNKYAASSYLSLTPEQWKSHKSYSCQVTHEGSTVEKTVAPTECS

SEQ ID NO: 330 - protein, 214 aa, Artificial Sequence
  Synthetic polypeptide representing artificial human antibody VL chain
DIQMTQSPSTLSASVGDRVTITCRASQSISRWLAWYQQKPGKAPKLLIYKASALESGVPSRFSGSGSGTEFTLTISSLQPDDFATYYCQQYDSYPLSFGGGTKVEIKRTVAAPSVFIFPPSDEQLKSGTASVVCLLNNFYPREAKVQWKVDNALQSGNSQESVTEQDSKDSTYSLSSTLTLSKADYEKHKVYACEVTHQGLSSPVTKSFNRGEW

SEQ ID NO: 331 - protein, 214 aa, Artificial Sequence
  Synthetic polypeptide representing artificial human antibody VL chain
ATTLTQSPAFMSATPGDRVNISCKASQDIDDDMNWYQQKPGEAAIFIIQEATTLVPGVPPRFSGSGYGTDFTLTINNIESEDAAYYFCLQHDNFPYTFGQGTKLEIKRTVAAPSVFIFPPSDEQLKSGTASVVCLLNNFYPREAKVQWKVDNALQSGNSQESVTEQDSKDSTYSLSSTLTLSKADYEKHKVYACEVTHQGLSSPVTKSFNRGEW

SEQ ID NO: 332 - protein, 215 aa, Artificial Sequence
  Synthetic polypeptide representing artificial human antibody VL chain
EIVLTQSPGTLSLSPGERAILSCRAGQSIGAAYLAWYQQKPGQAPRLLISGASRRATGIPDRFSGSGSGTDFTLTISRLEPEDFAVYYCQQYGSSPLTFGGGTKVEIKRTVAAPSVFIFPPSDEQLKSGTASVVCLLNNFYPREAKVQWKVDNALQSGNSQESVTEQDSKDSTYSLSSTLTLSKADYEKHKVYACEVTHQGLSSPVTKSFNRGEC

SEQ ID NO: 333 - protein, 214 aa, Artificial Sequence
  Synthetic polypeptide representing artificial human antibody VL chain
LYELTQPPSVSVSPGQTARITCSGDALPKKYAYWYQQKSGQAPVLVIYEDSKRPSGIPERFSGSSSGTMATLTISGAQVEDEADYYCYSTDSSGNHGVFGGGTKLTVLGQPKAAPSVTLFPPSSEELQANKATLVCLISDFYPGAVTVAWKADSSPVKAGVETTTPSKQSNNKYAASSYLSLTPEQWKSHKSYSCQVTHEGSTVEKTVAPTECS

SEQ ID NO: 334 - protein, 219 aa, Artificial Sequence
  Synthetic polypeptide representing artificial human antibody VL chain
DIVMTQSPLSLPVTPGEPASISCRSSQSLLHSDGYNYLDWYLQKPGQSPQLLIYLGSNRASGVPDRFSGSGSGTDFTLKISRVEAEDVGVYYCMQALQTPNTFGQGTKLEIKRTVAAPSVFIFPPSDEQLKSGTASVVCLLNNFYPREAKVQWKVDNALQSGNSQESVTEQDSKDSTYSLSSTLTLSKADYEKHKVYACEVTHQGLSSPVTKSFNRGEC

SEQ ID NO: 335 - protein, 217 aa, Artificial Sequence
  Synthetic polypeptide representing artificial human antibody VL chain
QSALTQPASVSGSPGQSITISCTGTSSDVGGYNYVSWYQHHPDKAPKLIIYEVKNRPSGVSNRFSGSKSDNTASLTISGLQAEDEADYYCNSYSSSSTLYVFGTGTKVTVLSQPKANPTVTLFPPSSEELQANKATLVCLISDFYPGAVTVAWKADSSPVKAGVETTKPSKQSNNKYAASSYLSLTPEQWKSHRSYSCQVTHEGSTVEKTVAPTECS

SEQ ID NO: 336 - protein, 215 aa, Artificial Sequence
  Synthetic polypeptide representing artificial human antibody VL chain
EIVLTQSPATLSLSPGERATLSCRASQSISSNLAWYQQKPGQAPRLLIYDASNRATGIPARFSGSGSGTDFTLTISSLEPEDFAVYYCQQHSNWPELTFGGGTKVEIKRTVAAPSVFIFPPSDEQLKSGTASVVCLLNNFYPREAKVQWKVDNALQSGNSQESVTEQDSKDSTYSLSSTLTLSKADYEKHKVYACEVTHQGLSSPVTKSFNRGEC

SEQ ID NO: 337 - protein, 216 aa, Artificial Sequence
  Synthetic polypeptide representing artificial human antibody VL chain
ASALTQPASVSGSPGQSITISCTGTSSDVGGYNYVSWYQQHPGKAPKLMIYDVSNRPSGVSNRFSGSKSGNTASLTISGLQAEDEADYYCSSYRSSGVYVFGTGTKVTVLGQPKANPTVTLFPPSSEELQANKATLVCLISDFYPGAVTVAWKADGSPVKAGVETTKPSKQSNNKYAASSYLSLTPEQWKSHRSYSCQVTHEGSTVEKTVAPTECS

SEQ ID NO: 338 - protein, 219 aa, Artificial Sequence
  Synthetic polypeptide representing artificial human antibody VL chain
QVVMTQTPLSLSVTPGQPASISCKSSQRLLHSDGKTYLYWYLQKPGQSPQLLIYEVSNRFSGVPDRFSGSGSGTDFTLKISRVEAADVGVYYCMQSIHLPYTFGQGTKLEIKRTVAAPSVFIFPPSDEQLKSGTASVVCLLNNFYPREAKVQWKVDNALQSGNSQESVTEQDSKDSTYSLSSTLTLSKADYEKHKVYACEVTHQGLSSPVTKSFNRGEW

SEQ ID NO: 339 - protein, 216 aa, Artificial Sequence
  Synthetic polypeptide representing artificial human antibody VL chain
EIVLTQSPGTLSLSPGERATLSCRASQSVSSSFLAWYQQKPGQAPRLLIYGASSRATGVADRFSGSGSGTDFTLTINRLEPEDFAVYYCHQYGGSPPNTFGQGTKVEIKRTVAAPSVFIFPPSDEQLKSGTASVVCLLNNFYPREAKVQWKVDNALQSGNSQESVTEQDSKDSTYSLSSTLTLSKADYEKHKVYACEVTHQGLSSPVTKSFNRGEC

SEQ ID NO: 340 - protein, 215 aa, Artificial Sequence
  Synthetic polypeptide representing artificial human antibody VL chain
DIQLTQSPSFLSASVGDRVTITCRASQDVDTYLAWYQQKPGKAPKLLIYAASTLHSGVPSRFSGSGAGTEFTLTISSLQPEDFATYYCQQLNSYPPLTFGGGTKVEIKRTVAAPSVFIFPPSDEQLKSGTASVVCLLNNFYPREAKVQWKVDNALQSGNSQESVTEQDSKDSTYSLSSTLTLSKADYEKHKVYACEVTHQGLSSPVTKSFNRGEC

SEQ ID NO: 341 - protein, 216 aa, Artificial Sequence
  Synthetic polypeptide representing artificial human antibody VL chain
QSVLTQPPSLSAAPGQKVIISCSGSSSNIGKYSVFWYQQVPGTGPKLLIFDNNRRPSGIRDRFSASKSGTSATLEITGLQTGDEAHYYCATWDSSLTAGVFGGGTKLTVLRQPKAAPSVTLFPPSSEELQANKATLVCLISDFYPGAVTVAWKADGSPVKAGVETTTPSKQSNNKYAASSYLSLTPEQWKSHKSYSCQVTHEGSTVEKTVAPTECS

SEQ ID NO: 342 - protein, 214 aa, Artificial Sequence
  Synthetic polypeptide representing artificial human antibody VL chain
EIVLTQSPATLSLSPGNRAALSCRASQSVGSSLHWYQQKPGQAPRLLIYDVSNRAAGIPGRFSASGSGTDFTLTISNLEPEDFAVYYCQQRSAWPITFGQGTRLEIKRTVAAPSVFIFPPSDEQLKSGTASVVCLLNNFYPREAKVQWKVDNALQSGNSQESVTEQDSKDSTYSLSSTLTLSKADYEKHKVYACEVTHQGLSSPVTKSFNRGEC

SEQ ID NO: 343 - protein, 216 aa, Artificial Sequence
  Synthetic polypeptide representing artificial human antibody VL chain
EIVLTQSPGTLSLSPGERATLSCRASQSVSSSYLAWYQQKPGQAPRLLISGASSRATGIPDRFSGSGSGTDFTLTISRLEPEDFAVYYCQQYGSSRKLTFGGGTKVEIKRTVAAPSVFIFPPSDEQLKSGTASVVCLLNNFYPREAKVQWKVDNALQSGNSQESVTEQDSKDSTYSLSSTLTLSKADYEKHKVYACEVTHQGLSSPVTKSFNRGEC

SEQ ID NO: 344 - protein, 107 aa, Artificial Sequence
  Synthetic polypeptide representing artificial human antibody VL chain
DIQMTQSPSTLSASVGDRVTITCRASQSISVWLAWYQQKPGKAPKLLIYKASTLEAGVPSRFSGSGSGTEFSLTISGLQPDDFGTYFCQHYDSYPWTFGQGTKVEMK

SEQ ID NO: 345 - protein, 215 aa, Artificial Sequence
  Synthetic polypeptide representing artificial human antibody VL chain
VSSELTQDPAVSVALGQTVRITCQGDSLRRYYVSWYRQKPGEAPVVVIYGKNNRPSWIPDRLSGSSSGNTASLTITGAQAEDEADYYCCSRDSSGNPWVFGGGTKLTVLGQPKAAPSVTLFPPSSEELQANKATLVCLISDFYPGAVTVAWKADSSPVKAGVETTTPSKQSNNKYAASSYLSLTPEQWKSHKSYSCQVTHEGSTVEKTVAPTECS

SEQ ID NO: 346 - protein, 214 aa, Artificial Sequence
  Synthetic polypeptide representing artificial human antibody VL chain
VIQMTQSPTSLSASVGDRVTITCRASQSISSYLNWYQQKLGKAPKLLIYAASSLQSGVPSRFSGSGSGTDFTLTISSLQPEDFATYYCQQSYSTSLTFGGGTKVEIKRTVAAPSVFIFPPSDEQLKSGTASVVCLLNNFYPREAKVQWKVDNALQSGNSQESVTEQDSKDSTYSLSSTLTLSKADYEKHKVYACEVTHQGLSSPVTKSFNRGEC

SEQ ID NO: 347 - protein, 217 aa, Artificial Sequence
  Synthetic polypeptide representing artificial human antibody VL chain
EIVLTQSPGTLSLSPGERATLSCRASQSVSSSYLAWYQQKPGQAPRLLIYDASSRAAGVPDRFSGSGSGTDFTLTISRLEPEDFAVYFCQQYDSSPPMYTFGQGTKLEIRRTVAAPSVFIFPPSDEQLKSGTASVVCLLNNFYPREAKVQWKVDNALQSGNSQESVTEQDSKDSTYSLSSTLTLSKADYEKHKVYACEVTHQGLSSPVTKSFNRGEC

SEQ ID NO: 348 - protein, 217 aa, Artificial Sequence
  Synthetic polypeptide representing artificial human antibody VL chain
PSVLTQPPSVSAAPGQKVTISCSGSSSNIDNNYVSWYQQLPGTAPKLLIYENNKRASGIPDRFSGSKSGTSATLGITGLQTGDEADYYCGTWDSSLSPGGVFGGGTKLTVLGQPKAAPSVTLFPPSSEELQANKATLVCLISDFYPGAVTVAWKADSSPVKAGVETTTPSKQSNNKYAASSYLSLTPEQWKSHRSYSCQVTHEGSTVEKTVAPTECS

SEQ ID NO: 349 - protein, 213 aa, Artificial Sequence
  Synthetic polypeptide representing artificial human antibody VL chain
DIQMTQSPSSLSASVGDRVTITCRASQTISTYLNWYQQKPGKAPKLLIYAASSLQSGVPSRFSGSGSETDFTLTISSLQPEDFATYYCQQSYNARTFGQGTKVEIKRTVAAPSVFIFPPSDEQLKSGTASVVCLLNNFYPREAKVQWKVDNALQSGNSQESVTEQDSKDSTYSLSSTLTLSKADYEKHKVYACEVTHQGLSSPVTKSFNRGEC

SEQ ID NO: 350 - protein, 221 aa, Artificial Sequence
  Synthetic polypeptide representing artificial human antibody VL chain
DIVMTQSPDSLAVSLGERATINCKSSQTVLHSSNNRNYLAWYQHKPGQPPKLLIYWASTRESGVPDRFSGSGSGTDFTLTINSLQAEDVAVYYCQQYYDTAPLTFGGGTKVEIKRTVAAPSVFIFPPSDEQLKSGTASVVCLLNNFYPREAKVQWKVDNALQSGNSQESVTEQDSKDSTYSLSSTLTLSKADYEKHKVYACEVTHQGLSSPVTKSFNRGEC

SEQ ID NO: 351 - protein, 214 aa, Artificial Sequence
  Synthetic polypeptide representing artificial human antibody VL chain
EIVMTQSPATLSVSPGERATLSCRASQSVDGNLAWYQQKPGQAPRLLIFDASTRATTIPVRFSGSGSGTEFTLTISSLQSEDFAVYYCQQYSKWPITFGQGTRLEIKRTVAAPSVFIFPPSDEQLKSGTASVVCLLNNFYPREAKVQWKVDNALQSGNSQESVTEQDSKDSTYSLSSTLTLSKADYEKHKLYACEVTHQGLSSPVTKSFNRGEC

SEQ ID NO: 352 - protein, 214 aa, Artificial Sequence
  Synthetic polypeptide representing artificial human antibody VL chain
DIQMTQSPSSLSASLGDRITITCRATQSISNYLNWYQQKSGKVPELLIYAASHLQSGVPSRFSGTGSGTDFSLTISGLQPEDFATYYCQQTYTTPRTFGRGTTVEIRRTVAAPSVFIFPPSDEQLKSGTASVVCLLNNFYPREAKVQWKVDNALQSGNSQESVTEQDSKDSTYSLSSTLTLSKADYEKHKVYACEVTHQGLSSPVTKSFNRGEC

SEQ ID NO: 353 - protein, 217 aa, Artificial Sequence
  Synthetic polypeptide representing artificial human antibody VL chain
PSVLTQPPSVSGAPGQRVTISCTGSSSNIGAGYDVHWYQQLPGTAPKLLIYGNINRPSGVPDRFSGSKSGPSASLTITGLQADDEADYYCQSYDSRLSGVVFGGGTKLTVLGQPKAAPSVTLFPPSSEELQANKATLVCLISDFYPGAVTVAWKADSSPVKAGVETTTPSKQSNNKYAASSYLSLTPEQWKSHRSYSCQVTHEGSTVEKTVAPTECS

SEQ ID NO: 354 - protein, 214 aa, Artificial Sequence
  Synthetic polypeptide representing artificial human antibody VL chain
EIVMTQSPATLSVSPGERATLSCRASQSVSTNLAWYQQRPGQAPRLFIFGASTRATGIPARFSGSGSGTEFTLTISSPQPEDSAVYYCQQYTTRPLTFGGGTKVEIKRTVAAPSVFIFPPSDEQLKSGTASVVCLLNNFYPREAKVQWKVDNALQSGNSQESVTEQDSKDSTYSLSSTLTLSKADYEKHKVYACEVTHQGLSSPVTKSFNRGEC

SEQ ID NO: 355 - protein, 214 aa, Artificial Sequence
  Synthetic polypeptide representing artificial human antibody VL chain
EIVLTQSPATLSLSPGEGATLSCRASQSVSGYLAWYQQKPGQAPRLLIYDASNRATGIPARFSGSGSGTDFTLTISSLEPEDFAVYYCQQRSKWPLTFGGGTQVEIKRTVAAPSVFIFPPSDEQLKSGTASVVCLLNNFYPREAKVQWKVDNALQSGNSQESVTEQDSKDSTYSLSSTLTLSKADYEKHKLYACEVTHQGLSSPVTKSFNRGEC

SEQ ID NO: 356 - protein, 217 aa, Artificial Sequence
  Synthetic polypeptide representing artificial human antibody VL chain
QSVVTQPPSASGPPGQTVTISCSGGRSNVASHAVHWYQHLPGTAPKLLIYNDHQRPSGVPDRFSGSKSGPSASLAISGLRSEDEADYYCATWDDSLGGRVVFGGGTKLTVLGQPKAAPSVTLFPPSSEELQANKATLVCLISDFYPGAVTVAWKADSSPVKAGVETTTPSKQSNNKYAASSYLSLTPEQWKSHRSYSCQVTHEGSTVEKTVAPTECS

SEQ ID NO: 357 - protein, 220 aa, Artificial Sequence
  Synthetic polypeptide representing artificial human antibody VL chain
DIVMTQTPLSMPVTPGEPASISCRSSQSLLDSDDGKTYLDWYLQKPGQSPQLLIYTVSYRASGVPDRFSGSGSGTDFTLKISRVEAEDVGVYYCMQRIEFPFTFGPGTKVDIKRTVAAPSVFIFPPSDEQLKSGTASVVCLLNNFYPREAKVQWKVDNALQSGNSQESVTEQDSKDSTYSLSSTLTLSKADYEKHKVYACEVTHQGLSSPVTKSFNRGEC

SEQ ID NO: 358 - protein, 106 aa, Artificial Sequence
  Synthetic polypeptide representing artificial human antibody VL chain
SYELTQPPSVSVSPGQTASITCSGDKLGDKYACWYQQKPGQSPVLVIYQDSKRPSGIPERFSGSNSGNTATLTISGTQAMDEADYYCQAWDSSTAVFGGGTKLTVL

SEQ ID NO: 359 - protein, 212 aa, Artificial Sequence
  Synthetic polypeptide representing artificial human antibody VL chain
PYELTQPPSVSVSPGQTANITCSGDKLGDICVCWYQQKPGQSPVLVIYQHNKRPSGIPERFSGSNSGNTATLTISATQATDEAIYYCQSWDSSSVLFGGGTKLTVLGQPKAAPSVTLFPPSSEELQANKATLVCLISDFYPGAVTVAWKADSSPVKAGVETTTPSKQSNNKYAASSYLSLTPEQWKSHRSYSCQVTHEGSTVEKTVAPTECS

SEQ ID NO: 360 - protein, 220 aa, Artificial Sequence
  Synthetic polypeptide representing artificial human antibody VL chain
GIVMTQSPDSLGVSLGERATINCKSSQSLFYSSNNKNYLAWYQQKPGQPPKLLIYWASTRESGVPDRFSGSGSGTDFTLTISSLQAEDVAVYYCQQYYGRLFTFGPGTKVDIRRTVAAPSVFIFPPSDEQLKSGTASVVCLLNNFYPREAKVQWKVDNALQSGNSQESVTEQDSKDSTYSLSSTLTLSKADYEKHKVYACEVTHQGLSSPVTKSFNRGEC

SEQ ID NO: 361 - protein, 216 aa, Artificial Sequence
  Synthetic polypeptide representing artificial human antibody VL chain
QIVLTQSPATLSLSPGERATLSCRASQSVSSYLAWYQQKPGQAPRLLIYDASNRATGIPARFSGGGSETDFTLTISSLEPEDFAVYYCQQRSNWPPRLPFGGGTKVEIKRTVAAPSVFIFPPSDEQLKSGTASVVCLLNNFYPREAKVQWKVDNALQSGNSQESVTEQDSKDSTYSLSSTLTLSKADYEKHKVYACEVTHQGLSSPVTKSFNRGEC

SEQ ID NO: 362 - protein, 215 aa, Artificial Sequence
  Synthetic polypeptide representing artificial human antibody VL chain
QIVLTQSPATLSLSPGERATLSCRASQSVSNYLAWYQQKPGQAPRLLIYDASNRATGIPARFSGSGSGTDFTLTISSLEPEDFAVYYCQQRSNWPPYTFGQGTKLDIKRTVAAPSVFIFPPSDEQLKSGTASVVCLLNNFYPREAKVQWKVDNALQSGNSQESVTEQDSKDSTYSLSSTLTLSKADYEKHKVYACEVTHQGLSSPVTKSFNRGEC

SEQ ID NO: 363 - protein, 219 aa, Artificial Sequence
  Synthetic polypeptide representing artificial human antibody VL chain
DIVMTQSPLSLPVTPGEPASISCRSSQSLLQSNGNNYLAWYLQKPGQSPQLLIYLGSNRASGVPDRFSGSGSGTDFTLKISKLAAEDVGVYYCMQALQTPYTFGQGTKLDIKRTVAAPSVFIFPPSDEQLKSGTASVVCLLNNFYPREAKVQWKVDNALQSGNSQESVTEQDSKDSTYSLSSTLTLSKADYEKHKVYACEVTHQGLSSPVTKSFNRGEC

SEQ ID NO: 364 - protein, 214 aa, Artificial Sequence
  Synthetic polypeptide representing artificial human antibody VL chain
DIQMTQSPSTLSASVGDRVTITCRASQSISGWLAWYQQKPGKAPQLLIYLVSSLESGVPSRFSGSGSGTEFTLTISSLQPDDFATYYCQHYDSYIGTFGQGTKVEIKRTVAAPSVFIFPPSDEQLKSGTASVVCLLNNFYPREAKVQWKVDNALQSGNSQESVTEQDSKDSTYSLSSTLTLSKADYEKHKLYACEVTHQGLSSPVTKSFNRGEC

SEQ ID NO: 365 - protein, 216 aa, Artificial Sequence
  Synthetic polypeptide representing artificial human antibody VL chain
QSVLTQPPSVSAAPGQKVTISCSGGSSNIGNNYVSWYQQLPGTAPKLIIYDNDKRPAGIPDRFSGSKSGSSATLGITGLQNGDEAEYYCGTWDSSLGGGVFGGGTKVTVLGQPKAAPSVTLFPPSSEELQANKATLVCLISDFYPGAVTVAWKADSSPVKAGVETTTPSKQSNNKYAASSYLSLTPEQWKSHRSYSCQVTHEGSTVEKTVAPTECS

SEQ ID NO: 366 - protein, 215 aa, Artificial Sequence; identical to SEQ ID NO: 362
  Synthetic polypeptide representing artificial human antibody VL chain

SEQ ID NO: 367 - protein, 112 aa, Artificial Sequence
  Synthetic polypeptide representing artificial human antibody VL chain
GIVMTQSPLSLPVTPGETASISCRSSQSLLRRDGNNYLEWYLQKPGQPPHLLIYLGSIRASRVPDRFSGTGSGTDFTLIISRVEADDVGVYYCMEAEQTPGTFGQGTKLEIK

SEQ ID NO: 368 - protein, 216 aa, Artificial Sequence
  Synthetic polypeptide representing artificial human antibody VL chain
QSALTQPASVSGSPGQSITISCTGTSSDVGGFNYVSWYQQHPGKAPKLLIYDVSERPSGVSSRFSGSKSGNTASLTISGLQAEDEADYYCSSYTSSTTVLFGGGTKLTVLGQPKAAPSVTLFPPSSEELQANKATLVCLISDFYPGAVTVAWKADSSPVKAGVETTTPSKQSNNKYAASSYLSLTPEQWKSHRSYSCQVTHEGSTVEKTVAPTECS

SEQ ID NO: 369 - protein, 220 aa, Artificial Sequence
  Synthetic polypeptide representing artificial human antibody VL chain
GVVMTQSPLSLPVTLGQPASISCRSSQSLVYSDGNTYLNWFQQRPGQSPRRLIYKVSNRDSGVPDRFSGSGSGTDFTLKISRVEAEDVGVYYCMQGTHWPPITFGQGTRLEIKRTVAAPSVFIFPPSDEQLKSGTASVVCLLNNFYPREAKVQWKVDNALQSGNSQESVTEQDSKDSTYSLSSTLTLSKADYEKHKVYACEVTHQGLSSPVTKSFNRGEC

SEQ ID NO: 370 - protein, 214 aa, Artificial Sequence
  Synthetic polypeptide representing artificial human antibody VL chain
DIQMTQSPSSLSASVGDRVTITCRASQSISSYLNWYQQKPGKAPKLLIYAASSLQSGVPSRFSGSGSGTDFTLAISSLQPEDFATYYCHQTYSTRLTFGGGTEVEIKRTVAAPSVFIFPPSDEQLKSGTASVVCLLNNFYPREAKVQWKVDNALQSGNSQESVTEQDSKDSTYSLSSTLTLSKADYEKHKVYACEVTHQGLSSPVTKSFNRGEC

SEQ ID NO: 371 - protein, 214 aa, Artificial Sequence
  Synthetic polypeptide representing artificial human antibody VL chain
DIQMTQSPSSLSASVGDRVTITCQASQDISNYLNWYQQKPGKAPKLLIYDASNLETGVPSRFSGSGSGTDFTLTISSLQPEDFATYYCQQYDNLPLTFGGGTKVEIKRTVAAPSVFIFPPSDEQLKSGTASVVCLLNNFYPREAKVQWKVDNALQSGNSQESVTEQDSKDSTYSLSSTLTLSKADYEKHKVYACEVTHQGLSSPVTKSFNRGEC

SEQ ID NO: 372 - protein, 214 aa, Artificial Sequence
  Synthetic polypeptide representing artificial human antibody VL chain
SYVLTQPPSVSVAPGQTARITCGGNNIGSKSVHWYQQKPGQAPVLVVYDDSDRPSGIPERFSGSNSGNTATLTISRVEAGDEADYYCQVWDSSSDPWVFGGGTKLTVLGQPKAAPSVTLFPPSSEELQANKATLVCLISDFYPGAVTVAWKADSSPVKAGVETTTPSKQSNNKYAASSYLSLTPEQWKSHKSYSCQVTHEGSTVEKTVAPTECS

SEQ ID NO: 373 - protein, 215 aa, Artificial Sequence
  Synthetic polypeptide representing artificial human antibody VL chain
DIQLTQSPSFLSASVGDRVTITCRASQVISDYVAWYQQKPGKAPKLLIYAASTLQSGVPSRFSGSGSGTEFTLTISSLQSEDFATYYCQQLNSYPPVTFGQGTRLDIKRTVAAPSVFIFPPSDEQLKSGTASVVCLLNNFYPREAKVQWKVDNALQSGNSQESVTEQDSKDSTYSLSSTLTLSKADYEKHKVYACEVTHQGLSSPVTKSFNRGEC

SEQ ID NO: 374 - protein, 214 aa, Artificial Sequence
  Synthetic polypeptide representing artificial human antibody VL chain
DIQMTQSPSSLSASVGDRVTITCRASQSISTYLNWYQQKPGKAPKLLIYVASSLQSGVPSRFSGSGSGTDFTLTISGLQPEDFATYYCQQSYSTPYTFGQGTKLEIKRTVAAPSVFIFPPSDEQLKSGTASVVCLLNNFYPREAKVQWKVDNALQSGNSQESVTEQDSKDSTYSLSSTLTLSKADYEKHKVYACEVTHQGLSSPVTKSFNRGEC

SEQ ID NO: 375 - protein, 215 aa, Artificial Sequence
  Synthetic polypeptide representing artificial human antibody VL chain
DIQMTQSPSTLSASVGDRVTITCRASQRISNWLAWYQQTPGKAPKLLIYKASSLESGVPSRFSGSGSGTEFTLTISSLQPDDFATYYCQQYSSSSPRTFGQGTKVEIKRTVAAPSVFIFPPSDEQLKSGTASVVCLLNNFYPREAKVQWKVDNALQSGNSQESVTEQDSKDSTYSLSSTLTLSKADYEKHKVYACEVTHQGLSSPVTKSFNRGEC

SEQ ID NO: 376 - protein, 112 aa, Artificial Sequence
  Synthetic polypeptide representing artificial human antibody VL chain
DILMTQTPLSLSVTPGQPASISCKSSQSLLNPDGKTYLYWYLQKSGQPPQLLIYELSNRFSGVPDRFSGSGSGTDFTLKISRVEAEDIGVYFCMQSLQLPITFGQGTRLEIK

SEQ ID NO: 377 - protein, 215 aa, Artificial Sequence
  Synthetic polypeptide representing artificial human antibody VL chain
DIQMTQSPSSLSASVGDRVTITCRASQSISGYLNWYQQKPGKAPKLLIYAASSLQSGVPSRFSGSGSGTDFTLTISSLQPEDFATYYCQQSYSTRLLTFGPGTKVDIKRTVAAPSVFIFPPSDEQLKSGTASVVCLLNNFYPREAKVQWKVDNALQSGNSQESVTEQDSKDSTYSLSSTLTLSKADYEKHKVYACEVTHQGLSSPVTKSFNRGEC

SEQ ID NO: 378 - protein, 217 aa, Artificial Sequence
  Synthetic polypeptide representing artificial human antibody VL chain
QSVLTQPPSVSGAPGQRVTISCTGSSSNVGADYDVHWYQQLPGTAPKLLIYGNRNRPSGVPDRFSGSKSGTSASLAITGLQAEDEADYYCQSFDSSLRGYVFGTGTKVTVLGQPKANPTVTLFPPSSEELQANKATLVCLISDFYPGAVTVAWKADGSPVKAGVETTKPSKQSNNKYAASSYLSLTPEQWKSHRSYSCQVTHEGSTVEKTVAPTECS

SEQ ID NO: 379 - protein, 216 aa, Artificial Sequence
  Synthetic polypeptide representing artificial human antibody VL chain
EIVLTQSPDTLSLSPGERATLSCRASQSVSSSLAWYQQKPGQAPRLLIYYASNRATDIPARFSGSGSGTDFTLTISSLEPEDFALYYCQHRITWPPLITFGQGTRLEIKRTVAAPSVFIFPPSDEQLKSGTASVVCLLNNFYPREAKVQWKVDNALQSGNSQESVTEQDSKDSTYSLSSTLTLSKADYEKHKVYACEVTHQGLSSPVTKSFNRGEC

SEQ ID NO: 380 - protein, 215 aa, Artificial Sequence
  Synthetic polypeptide representing artificial human antibody VL chain
EIVLTQSPGTLSLSPGERATLSCRASQSFDGKSLAWYQQKPGQTPRLLVYGASSRATGIPDRFGGSGSGTDFTLTISRLESEDFAVYFCQQYAYVPITFGQGTRLERKRTVAAPSVFIFPPSDEQLKSGTASVVCLLNNFYPREAKVQWKVDNALQSGNSQESVTEQDSKDSTYSLSSTLTLSKADYEKHKVYACEVTHQGLSSPVTKSFNRGEC

SEQ ID NO: 381 - protein, 220 aa, Artificial Sequence
  Synthetic polypeptide representing artificial human antibody VL chain
GIVMTQSPDSLAVSLGERATINCKSSQSILYSSNNKDSLAWYQQKPGQPPKLLISSASTRQSGVPDRFSGSGSGTDFTLTISSLQAEDVAVYYCQQYYSIPLTFGPGTKVDIKRTVAAPSVFIFPPSDEQLKSGTASVVCLLNNFYPREAKVQWKVDNALQSGNSQESVTEQDSKDSTYSLSSTLTLSKADYEKHKVYACEVTHQGLSSPVTKSFNRGEW

SEQ ID NO: 382 - protein, 108 aa, Artificial Sequence
  Synthetic polypeptide representing artificial human antibody VL chain
EIVLTQSPGTLSLSLGERATLSCRASQSVSGSHLAWYQQKPGQAPRLLIYDASSRATGIPDRFSGSGSGTEFTLTISRLEPEDFAVYYCQQYGSSPLWFGQGTKVEIK

SEQ ID NO: 383 - protein, 216 aa, Artificial Sequence
  Synthetic polypeptide representing artificial human antibody VL chain
QSALTQPASVSGSPGQSITISCTGTSSDVGGYNYVSWYQQHPGKAPKLMIYDVSNRPSGVSNRFSGSKSGNTASLTISGLQAEDEADYYCSSYTSSSTQVFGTGTKVTVLGQPKANPTVTLFPPSSEELQANKATLVCLISDFYPGAVTVAWKADGSPVKAGVETTKPSKQSNNKYAASSYLSLTPEQWKSHRSYSCQVTHEGSTVEKTVAPTECS

SEQ ID NO: 384 - protein, 214 aa, Artificial Sequence
  Synthetic polypeptide representing artificial human antibody VL chain
PYELTQPPSVSVSPGQTARITCSGDALPKKYAYWYQQKSGQAPVLVIYEDSKRPSGIPERFSGSSSGTMATLTISGAQVEDEADYYCYSTDSSGNHRVFGGGTKLTVLGQPKAAPSVTLFPPSSEELQANKATLVCLISDFYPGAVTVAWKADSSPVKAGVETTTPSKQSNNKYAASSYLSLTPEQWKSHKSYSCQVTHEGSTVEKTVAPTECS

SEQ ID NO: 385 - protein, 215 aa, Artificial Sequence
  Synthetic polypeptide representing artificial human antibody VL chain
EIVMTQSPATLSVSPGETATLSCRASQSVSSNLAWYQQKPGQAPRLLMYGASTRATSVPARFSGSASGTDFTLTISSLQSEDFALYYCQQYNNWPQYTFGQGTKLEIKRTVAAPSVFIFPPSDEQLKSGTASVVCLLNNFYPREAKVQWKVDNALQSGNSQESVTEQDSKDSTYSLSSTLTLSKADYEKHKVYACEVTHQGLSSPVTKSFNRGEW

SEQ ID NO: 386 - protein, 217 aa, Artificial Sequence
  Synthetic polypeptide representing artificial human antibody VL chain
EIVLTQSPGTLSLSPGERATLSCRASQSVSSSYLVWYQQKAGQAPRLLIYGASSRATGISDRFSGSGSGTDFTLTISRLEPEDFAVYYCQHFRSSPPTYTFGQGTKLEIKRTVAAPSVFIFPPSDEQLKSGTASVVCLLNNFYPREAKVQWKVDNALQSGNSQESVTEQDSKDSTYSLSSTLTLSKADYEKHKVYACEVTHQGLSSPVTKSFNRGEC

SEQ ID NO: 387 - protein, 216 aa, Artificial Sequence
  Synthetic polypeptide representing artificial human antibody VL chain
QSALTQPASVSGSPGQSITISCTGTSSDVGLYNFVSWYQQHPGKAPKLMIFDVNNRPSGVSNRFSGSKSDNTASLTISGLQAEDEADYYCSSYSRTTTLVFGGGTKVTVLGQPKAAPSVTLFPPSSEELQANKATLVCLISDFYPGAVTVAWKADSSPIKAGVETTTPSKQSNNKYAASSYLSLTPEQWKSHRSYSCQVTHEGSTVEKTVAPTECS

SEQ ID NO: 388 - protein, 218 aa, Artificial Sequence
  Synthetic polypeptide representing artificial human antibody VL chain
PAVLTQPPSVSGAPGQRVTISCTGSNSNIGAGYYVHWYQHRPGAAPKRLIYADSDRPSGVPDRFSGSRSGTSASLAITGLQAEDEADYYCQSYDSGLSAPWVFGGGTKLTVLGQPKAAPSVTLFPPSSEELQANKATLVCLISDFYPGAVTVAWKADSSPVKAGVETTTPSKQSNNKYAASSYLSLTPEQWKSHKSYSCQVTHEGSTVEKTVAPTECS

SEQ ID NO: 389 - protein, 215 aa, Artificial Sequence
  Synthetic polypeptide representing artificial human antibody VL chain
EIVLTQSPGTLSLSPGQRATLSCRASQSVTSSYLAWYQQKPGQAPRLLIYAASSRATGTPDRFSGSGSGTDFTLTISRLEPEDFAVYSCQQYGNSPPTFGGGTKVEIKRTVAAPSVFIFPPSDEQLKSGTASVVCLLNNFYPREAKVQWKVDNALQSGNSQESVTEQDSKDSTYSLSSTLTLSKADYEKHKVYACEVTHQGLSSPVTKSFNRGEC

SEQ ID NO: 390 - protein, 110 aa, Artificial Sequence
  Synthetic polypeptide representing artificial human antibody VL chain
PSVLTQPLSASGTPGQRVTISCSGSSSNIGDNFVYWYQQFPGTAPKVLIFKNNQRPSGVPDRFFGSKSGTSASLAISGLRSEDEAEYYCATWDDDLSGPVFGGGTKVTVL

SEQ ID NO: 391 - protein, 107 aa, Artificial Sequence
  Synthetic polypeptide representing artificial human antibody VL chain
ETTLMQSPALISATPGDKVHISCKASQDIDDDLNWYQQKPGEAPILIIEEATNLGPGFSPRFSGSGYGTDFTLTIYDIESGDAAFYFCLQHDTFPLTFGQGTKVEIK

SEQ ID NO: 392 - protein, 214 aa, Artificial Sequence
  Synthetic polypeptide representing artificial human antibody VL chain
DIQMTQSPSTLSASVGDKVTITCRASQSVGSWLAWYQQKPGKAPKLLISVASSLESGVPSRFSGSGSGTEFTLTVSSLQPDDFATYYCQQYNSYSWTFGQGTKVELKRTVAAPSVFIFPPSDEQLKSGTASVVCLLNNFYPREAKVQWKVDNALQSGNSQESVTEQDSKDSTYSLSSTLTLSKADYEKHKVYACEVTHQGLSSPVTKSFNRGEL

SEQ ID NO: 393 - protein, 214 aa, Artificial Sequence
  Synthetic polypeptide representing artificial human antibody VL chain
DIQLTQSPSFLSASVGDRVTITCRASQDISSFLAWYQQKPGKAPDLLIYAASTLQSGVPSRFSGSGSGTEFTLTISSLQPEDFAAYYCQHLTSFPYTFGQGTKLEIKRTVAAPSVFIFPPSDEQLKSGTASVVCLLNNFYPREAKVQWKVDNALQSGNSQESVTEQDSKDSTYSLSSTLTLSKADYEKHKVYACEVTHQGLSSPVTKSFNRGEL

SEQ ID NO: 394 - protein, 215 aa, Artificial Sequence
  Synthetic polypeptide representing artificial human antibody VL chain
VSSELTQDPAVSVALGQTVRITCQGDSLRDYSASWYQQKPGQAPILVIFFRNKRPSGIPDRFSGSASGNTASLTITGAQAEDEADYYCGSRDSSGNPSVFGAGTKVTVLGQPKANPTVTLFPPSSEELQANKATLVCLISDFYPGAVTVAWKADGSPVKAGVETTKPSKQSNNKYAASSYLSLTPEQWKSHRSYSCQVTHEGSTVEKTVAPTECS

SEQ ID NO: 395 - protein, 214 aa, Artificial Sequence
  Synthetic polypeptide representing artificial human antibody VL chain
EIVLTQSPATLSLSPGEGATLSCRASQSVSAYLGWYQQKPGQAPRLLIYDTSNRATGIPARFSGSGSGTDFTLTISSLEPEDFAVYYCQQRSNWLYTFGQGTKLEIKRTVAAPSVFIFPPSDEQLKSGTASVVCLLNNFYPREAKVQWKVDNALQSGNSQESVTEQDSKDSTYSLSSTLTLSKADYEKHKVYACEVTHQGLSSPVTKSFNRGEW

SEQ ID NO: 396 - protein, 215 aa, Artificial Sequence
  Synthetic polypeptide representing artificial human antibody VL chain
SYVLTQPPSVSVAPGKTARITCGGNNIGSKSVHWYQQKPGQAPVLVIYYDSDRPSGIPERFSGSNSGNTATLTISRVEAGDEADYYCQVWDSSSDHQEVFGGGTKLTVLGQPKAAPSVTLFPPSSEELQANKATLVCLISDFYPGAVTVAWKADGSPVKAGVETTTPSKQSNNKYAASSYLSLTPEQWKSHRSYSCQVTHEGSTVEKTVAPTECS

SEQ ID NO: 397 - protein, 216 aa, Artificial Sequence
  Synthetic polypeptide representing artificial human antibody VL chain
QSALTQPASVSGSPGQSITISCTGSSSDVGNYNLVSWYQLHPGKAPKLMIYEVIKRPSGVSSHFSGSKSGNTASLTISGLQAEDEADYYCCSYAPSNTYVFGTGTRVTVLGQPKANPTVTLFPPSSEELQANKATLVCLISDFYPGAVTVAWKADGSPVKAGVETTKPSKQSNNKYAASSYLSLTPEQWKSHRSYSCQVTHEGSTVEKTVAPTECS

SEQ ID NO: 398 - protein, 214 aa, Artificial Sequence
  Synthetic polypeptide representing artificial human antibody VL chain
QIVLTQSPATLSLSPGERVTLSCRASQSVRSHLAWYQQKPGQAPRLLMYDAFNRATGTPARFSGSGSGTDFTLTISSLEPEDFAIYYCQQRSNWPLTFGGGTKVEIKRTVAAPSVFIFPPSDEQLKSGTASVVCLLNNFYPREAKVQWKVDNALQSGNSQESVTEQDSKDSTYSLSSTLTLSKADYEKHKVYACEVTHQGLSSPVTKSFNRGEL

SEQ ID NO: 399 - protein, 216 aa, Artificial Sequence
  Synthetic polypeptide representing artificial human antibody VL chain
VSSELTQDPAVSVALGQTVRITCQGDSLRSYYATWYQQKPGQAPLLVIFDKDKRPSGIPDRFSGSSSGNTASLTITGAQPEDEAVYYCNSRDSSAHDHLLFGGGTTLTVLGQPKAAPSVTLFPPSSEELQANKATLVCLISDFYPGAVTVAWKADSSPVKAGVETTTPSKQSNNKYAASSYLSLTPEQWKSHRSYSCQVTHEGSTVEKTVAPTECS

SEQ ID NO: 400 - protein, 216 aa, Artificial Sequence
  Synthetic polypeptide representing artificial human antibody VL chain
EVVLTQSPGTLSLSPGERATLFCKASQAIVSNYLVWYQQKPGLAPRLLIYSASTRATGIPDRFSGGGSGTDFSLTISGLEPEDFAVYYCQHFGDSPLYIFGQGTKVEIKRTVAAPSVFIFPPSDEQLKSGTASVVCLLNNFYPREAKVQWKVDNALQSGNSQESVTEQDSKDSTYSLSSTLTLSKADYEKHKVYACEVTHQGLSSPVTKSFNRGEC

SEQ ID NO: 401 - protein, 212 aa, Artificial Sequence
  Synthetic polypeptide representing artificial human antibody VL chain
PYELTQPLSVSVALGQTARVTCGGTNIGKKDVHWYQQKPGQAPVLVIYRDDNRPSGIPERFSGLNSGHTATLTISRAQAGDEADYYCQVWDSSTAVFGGGTKLTVLGQPKAAPSVTLFPPSSEELQANKATLVCLISDFYPGAVTVAWKADSSPVKAGVETTTPSKQSNNKYAASSYLSLTPEQWKSHRSYSCQVTHEGSTVEKTVAPTECS

SEQ ID NO: 402 - protein, 108 aa, Artificial Sequence
  Synthetic polypeptide representing artificial human antibody VL chain
LYVLTQPPSVSVAPGKTARITCGGNNIGSKSVHWYQQKPGQAPVLVIYDDSDRPSGIPERFSGSNSGNTATLTISRVEAGDEADYYCQVWDSSSDHVVFGGGTKLTVQ

SEQ ID NO: 403 - protein, 214 aa, Artificial Sequence
  Synthetic polypeptide representing artificial human antibody VL chain
SYELTQTPSVSVSPGQTARITCSGDALPKQSVNWYQQRPGQAPVVVICKDTERPSGIPERFSGSTSGTTVTLTIGGVQAEDEADYYCQSADSSGFYVVFGGGTKLTVLGQPKAAPSVTLFPPSSEELQANKATLVCLISDFYPGAVTVAWKADSSPVKAGVETTTPSKQSNNKYAASSYLSLTPEQWKSHKSYSCQVTHEGSTVEKTVAPTECS

SEQ ID NO: 404 - protein, 212 aa, Artificial Sequence
  Synthetic polypeptide representing artificial human antibody VL chain
SYELTQPPSVSVSPGQTARITCSGDALPKQYAYWYQQKPGQAPVLVIYKDSERPSGIPERFSGSSSGTTVTLTISGVQAEDEADYYCQSADSSSPVFGGGTKLTVLGQPKAAPSVTLFPPSSEELQANKATLVCLISDFYPGAVTVAWKADSSPVKAGVETTTPSKQSNNKYAASSYLSLTPEQWKSHRSYSCQVTHEGSTVEKTVAPTECS

SEQ ID NO: 405 - protein, 213 aa, Artificial Sequence
  Synthetic polypeptide representing artificial human antibody VL chain
SYELTQPPSVSVPPGQTARITCSGDALPKKYAYWYQQKSGQAPVLVIYEDTKRPSGIPDRFSGSSSGTMATLTISGAQVEDDADYYCYSTDSRATGVFGGGTKLTVLGQPKAAPSVTLFPPSSEELQANKATLVCLISDFYPGAVTVAWKADSSPVKAGVETTTPSKQSNNKYAASSYLSLTPEQWKSHRSYSCQVTHEGSTVEKTVAPTECS

SEQ ID NO: 406 - protein, 214 aa, Artificial Sequence
  Synthetic polypeptide representing artificial human antibody VL chain
AVQMTQSPSSLSASVGDRVTISCRASQTIDTYLNWYQQRPGKAPQLLIYAASSLQSGVPSRFSASGSGTHFTLIINSLQPEDFATYYCQQSYSTPQTFGQGTKVEIKRTVAAPSVFIFPPSDEQLKSGTASVVCLLNNFYPREAKVQWKVDNALQSGNSQESVTEQDSKDSTYSLSSTLTLSKADYEKHKVYACEVTHQGLSSPVTKSFNRGEC

SEQ ID NO: 407 - protein, 107 aa, Artificial Sequence
  Synthetic polypeptide representing artificial human antibody VL chain
DIQMTQSPSSLSASVGDRVTITCQATQGITNYLNWYQQKPGKAPKVLIYDASNLETGVPSRFSGNGSGTHFTFTISSLQPEDIATYYCQQYENLPLTFGGGTKVEIK

SEQ ID NO: 408 - protein, 214 aa, Artificial Sequence
  Synthetic polypeptide representing artificial human antibody VL chain
DIQMTQSPSSLSASVGDRVTITCQASQDISTFLNWYQQKPGKAPKLLIYDESNLETGVPSRFSGSGSGTDFTFTISSLQPEDIATYYCQQFDNLPLTFGGGTRLEIKRTVAAPSVFIFPPSDEQLKSGTASVVCLLNNFYPREAKVQWKVDNALQSGNSQESVTEQDSKDSTYSLSSTLTLSKADYEKHKVYACEVTHQGLSSPVTKSFNRGEC

SEQ ID NO: 409 - protein, 110 aa, Artificial Sequence
  Synthetic polypeptide representing artificial human antibody VL chain
QSALTQPRSVSGSPGQSVTISCTGTSSDIGGYNYVSWYQQHPGKAPKFVIYDVSQRPSGVPDRFSGSKSGNTASLTISGLQADDEADYYCSSYAGSYTWVFGGGTKVIVL

SEQ ID NO: 410 - protein, 105 aa, Artificial Sequence
  Synthetic polypeptide representing artificial human antibody VL chain
SYELTQPPSVSVSPGQTASITCSGDKLGDKYACWYQQKPGQSPVVVIYQDTKRPSGIPERFSGSNSGNTATLTISGTQAMDEADYYCQAWDSSTVVFGGGTKLTV

SEQ ID NO: 411 - protein, 110 aa, Artificial Sequence
  Synthetic polypeptide representing artificial human antibody VL chain
PSVLTQPPSLSAAPGQRVTISCSGSTSNIGNNFVSWYQQLPGAAPKLLIYDNDKRPSEIPDRFSGSKSGTSATLAITGLQTGDEADYYCGTWDSSLGAYVFGTGTKVTVL

SEQ ID NO: 412 - protein, 214 aa, Artificial Sequence
  Synthetic polypeptide representing artificial human antibody VL chain
EIVLTQSPGTLSLSPGERATLSCRASQSISSTYLVWYQQKPGQAPRLLIYAASYRATGIPDRFSGSGSGTDFILTISRLEPEDFAVYYCQQYGSSLTFGGGTKVEIKRTVAAPSVFIFPPSDEQLKSGTASVVCLLNNFYPREAKVQWKVDNALQSGNSQESVTEQDSKDSTYSLSSTLTLSKADYEKHKVYACEVTHQGLSSPVTKSFNRGEC

SEQ ID NO: 413 - protein, 215 aa, Artificial Sequence
  Synthetic polypeptide representing artificial human antibody VL chain
EIELTQSPGTLSLSPGERATLSCRASQSVSSSYLAWYQQKPGQAPRLLIYGASSRATGIPDRFSGSGSGTDFTLTISRLEPEDFAVYYCQQYGSSPLTFGGGTKVEIKRTVAAPSVFIFPPSDEQLKSGTASVVCLLNNFYPREAKVQWKVDNALQSGNSQESVTEQDSKDSTYSLSSTLTLSKADYEKHKLYACEVTHQGLSSPVTKSFNRGEC

SEQ ID NO: 414 - protein, 216 aa, Artificial Sequence
  Synthetic polypeptide representing artificial human antibody VL chain
ASALTQPASVSGSPGQSITISCNGSSSDVGDYNYVSWYQQHPGKAPKLMIYDVSNRPSGVSNRFSGSKSGNTASLTISGLQAEDEADYYCSSYTSSRSLVFGGGTKLTVLGQPKAAPSVTLFPPSSEELQANKATLVCLISDFYPGAVTVAWKADSSPVKAGVETTTPSKQSNNKYAASSYLSLTPEQWKSHRSYSCQVTHEGSTVEKTVAPTECS

SEQ ID NO: 415 - protein, 214 aa, Artificial Sequence
  Synthetic polypeptide representing artificial human antibody VL chain
DIQMTQSPSSLSASVGDKVTMTCRASQFISVYVNWYQQKPGKAPKLLIYTASSLESGVSSRFSGGGSGTDFTLTIRSLQPEDFAIYYCQQTYSTPWTFGPGTRVEIKRTVAAPSVFIFPPSDEQLKSGTASVVCLLNNFYPREAKVQWKVDNALQSGNSQESVTEQDSKDSTYSLSSTLTLSKADYEKHKVYACEVTHQGLSSPVTKSFNRGEC

SEQ ID NO: 416 - protein, 214 aa, Artificial Sequence
  Synthetic polypeptide representing artificial human antibody VL chain
GEVVMTQSPATLSVSPGERATLSCRASQSVSSKVAWYQQRPGRAPRLLIYGASTRATDIPARFSGSGSGTEFTLTISSLQSEDFAVYYCQQYNNWLTFGGGTKVEIKRTVAAPSVFIFPPSDEQLKSGTASVVCLLNNFYPREAKVQWKVDNALQSGNSQESVTEQDSKDSTYSLSSTLTLSKADYEKHKVYACEVTHQGLSSPVTKSFNRGEW

SEQ ID NO: 417 - protein, 106 aa, Artificial Sequence
  Synthetic polypeptide representing artificial human antibody VL chain
SYELTQPSSVSVSPGQTARITCSGDVLAKNYARWFQQKPGQAPLLVIYKDNIRPSGIPERFSGSSSGTTVTLTISGAHVDDEADYYCYSTPDNNGVFGGGTKLIVL

SEQ ID NO: 418 - protein, 216 aa, Artificial Sequence
  Synthetic polypeptide representing artificial human antibody VL chain
QSALTQPASVSGSPGQSITISCTGTSSDVGAYPYVSWYQHHPGRAPKLTIFDVINRPSGVSNRFSGSKSGNTASLTISGLQAEDEAFYYCSSYTTSNSVVFGGGTKLTVLSQPKAAPSVTLFPPSSEELQANKATLVCLISDFYPGAVTVAWKADSSPVKAGVETTTPSKQSNNKYAASSYLSLTPEQWKSHRSYSCQVTHEGSTVEKTVAPTECS

SEQ ID NO: 419 - protein, 215 aa, Artificial Sequence
  Synthetic polypeptide representing artificial human antibody VL chain
EIVLTQSPGTLSLSPGERATLSCRASQSLSSGYLAWYQQKPGQAPRLLIYGASYRATDIPDRFSGSGSGTDFTLTISRLEPEDFAVYYCQQYDNSPLTFGGGTKVEIKRTVAAPSVFIFPPSDEQLKSGTASVVCLLNNFYPREAKVQWKVDNALQSGNSQESVTEQDSKDSTYSLSSTLTLSKADYEKHKVYACEVTHQGLSSPVTKSFNRGEC

SEQ ID NO: 420 - protein, 113 aa, Artificial Sequence
  Synthetic polypeptide representing artificial human antibody VL chain
GIVMTQSPDSLAVSLGERATINCKSSQSLLYRSNDKNYFAWYQQKPGQPPKLLIYWASTRESGVPDRFSGSGSGTDFTLTISSLQAEDVAVYYCQQYWGTPYTFGQGTKLEIK

SEQ ID NO: 421 - protein, 216 aa, Artificial Sequence
  Synthetic polypeptide representing artificial human antibody VL chain
PAVLTQAPSVSGAPGQRVTISCTGSGSNIGAGYDAHWYQQLPGTAPKLLIYRNTNRPSGVPDRFSGSKSGSSASLAITGLQPEDEAEYYCQSYDSGLGVVFGGGTKLTVLGQPKAAPSVTLFPPSSEELQANKATLVCLISDFYPGAVTVAWKADSSPVKAGVETTTPSKQSNNKYAASSYLSLTPEQWKSHRSYSCQVTHEGSTVEKTVAPTECS

SEQ ID NO: 422 - protein, 216 aa, Artificial Sequence
  Synthetic polypeptide representing artificial human antibody VL chain
QSALTQPPSASGSPGQSVTISCTGTSSDVGGYDHVSWYQQHPGKAPKVMIYEVTKRPSGVPDRFSGSKSGNTASLTVSGLQAEDEAEYYCSSYAGINNLVFGGGTKLTVLGQPKAAPSVTLFPPSSEELQANKATLVCLISDFYPGAVTVAWKADSSPVKAGVETTTPSKQSNNKYAASSYLSLTPEQWKSHRSYSCQVTHEGSTVEKTVAPTECS

SEQ ID NO: 423 - protein, 214 aa, Artificial Sequence
  Synthetic polypeptide representing artificial human antibody VL chain
DIQMTQSPSTLSASVGDRVTITCRASQSISSWLAWYQQKPGKAPKLLIYKASSLESGVPSRFSGSGSGTEFTLTISSLQPDDFATYYCQQYNSYSQTFGQGTKVEIKRTVAAPSVFIFPPSDEQLKSGTASVVCLLNNFYPREAKVQWKVDNALQSGNSQESVTEQDSKDSTYSLSSTLTLSKADYEKHKVYACEVTHQGLSSPVTKSFNRGEC

SEQ ID NO: 424 - protein, 214 aa, Artificial Sequence
  Synthetic polypeptide representing artificial human antibody VL chain
EIVMTQSPATLSVSPGERATLSCRASQSIVTNLAWFQQKPAQAPRLLIYGASTRATDVPARFSGSGSGTEFTLTVSSLQSEDFAIYFCQQYTDWPYTFGQGTKLEIKRTVAAPSVFIFPPSDEQLKSGTASVVCLLNNFYPREAKVQWKVDNALQSGNSQESVTEQDSKDSTYSLSSTLTLSKADYEKHKVYACEVTHQGLSSPVTKSFNRGEC

SEQ ID NO: 425 - protein, 216 aa, Artificial Sequence
  Synthetic polypeptide representing artificial human antibody VL chain
PLVLTQSPSASASLGASVKLTCTLSSGHSTYAIAWHQQRPEKGPRYLMKLNSDGSHIKGDGIPARFSGASSGVDRYLIISSSQSEDEADYYCQTWGTVGVFGGGTKLTVLGQPKAAPSVTLFPPSSEELQANKATLVCLISDFYPGAVTVAWKADSSPVKAGVETTTPSKQSNNKYAASSYLSLTPEQWKSHKSYSCQVTHEGSTVEKTVAPTECS

SEQ ID NO: 426 - protein, 215 aa, Artificial Sequence
  Synthetic polypeptide representing artificial human antibody VL chain
EIVLTQSPGTLSLSPGERATLSCRAGQSVSSSYLAWYQQKPGQAPRLLIYGASSRATGIPDRFSGSGSGTDFTLTISRLEPEDFAVYYCQQYGSSPWTFGQGTKVEIKRTVAAPSVFIFPPSDEQLKSGTASVVCLLNNFYPREAKVQWKVDNALQSGNSQESVTEQDSKDSTYSLSSTLTLSKADYEKHKVYACEVTHQGLSSPVTKSFNRGEC

SEQ ID NO: 427 - protein, 217 aa, Artificial Sequence
  Synthetic polypeptide representing artificial human antibody VL chain
QSVLTQPPSVSGAPGQRVTIPCTGSSSNLGAGYAVHWYQQLPATTPKLLIYANSSRPSGVPDRFSGSRSDTSASLAITGLQAEDEADYYCQSYDSSLSGYVFGTGTWVTVLSQPKANPTVTLFPPSSEELQANKATLVCLISDFYPGAVTVAWKADGSPVKAGVETTKPSKQSNNKYAASSYLSLTPEQWKSHRSYSCQVTHEGSTVEKTVAPTECS

SEQ ID NO: 428 - protein, 217 aa, Artificial Sequence
  Synthetic polypeptide representing artificial human antibody VL chain
QSVLTQPPSVSGAPGQRITISCTGGSTNIGTIYDVHWYQQLPGAAPKLLIYGNSRRPSGVPDRFSASKSGTSASLAISGLRPEDEADYYCQCFDTSLTAKVFGGGTKLTVLGQPKAAPSVTLFPPSSEELQANKATLVCLISDFYPGAVTVAWKADSSPVKAGVETTTPSKQSNNKYAASSYLSLTPEQWKSHRSYSCQVTHEGSTVEKTVAPTECS

SEQ ID NO: 429 - protein, 112 aa, Artificial Sequence
  Synthetic polypeptide representing artificial human antibody VL chain
DILLTQSPLFLSVTPGEPASISCRSNQSLLSSNGHHLLDWYFQKPGQSPQLLMFLGSTRASGVPDRFSGSASGTEFTLKISTVEAEDFGVYYCMQALQVPRTFGRGTKVEIK

SEQ ID NO: 430 - protein, 214 aa, Artificial Sequence
  Synthetic polypeptide representing artificial human antibody VL chain
DIQLTQSPSFLSASVGDRVTITCRASQGISSYLAWYQQKPGKAPKLLIYAASTLQSGVPSRFSGSGSGTEFTLTISSLQPEDFATYYCQQLNSYPLTFGGGTKVEIKRTVAAPSVFIFPPSDEQLKSGTASVVCLLNNFYPREAKVQWKVDNALQSGNSQESVTEQDSKDSTYSLSSTLTLSKADYEKHKLYACEVTHQGLSSPVTKSFNRGEL

SEQ ID NO: 431 - protein, 216 aa, Artificial Sequence
  Synthetic polypeptide representing artificial human antibody VL chain
PAVLTQPPSASGTPGQRVTISCSGSNSNIGSTFVYWYQQLPGTAPKLLIHSNNQRPSGVPDRVSGSKSGTSASLAISGLRSEDEADYYCAAWDDSLSGPVFGGGTKLTVLGQPKAAPSVTLFPPSSEELQANKATLVCLISDFYPGAVTVAWKADSSPVKAGVETTTPSKQSNNKYAASSYLSLTPEQWKSHKSYSCQVTHEGSTVEKTVAPTECS

SEQ ID NO: 432 - protein, 219 aa, Artificial Sequence
  Synthetic polypeptide representing artificial human antibody VL chain
DIVLTQSPLSLPVTPGEPASISCRSSQSLLHSNGVYYLDWYLLKPGQSPQLVIYMGSSRASGVPDRFSGSGSGTDFRLKISRVEAEDVGIYYCMQALQTPWTFGQGTKVEIKRTVAAPSVFIFPPSDEQLKSGTASVVCLLNNFYPREAKVQWKVDNALQSGNSQESVTEQDSKDSTYSLSSTLTLSKADYEKHKVYACEVTHQGLSSPVTKSFNRGEW

SEQ ID NO: 433 - protein, 216 aa, Artificial Sequence
  Synthetic polypeptide representing artificial human antibody VL chain
VSSELTQDPAVSVALGQTVRITCQGDSLRSYFATWYQQKPGQAPVLVIYGKNSRPSGIPDRFSGSTSGNTASLTISGAQAEDEADYYCNSRDSSDDHLEVFGGGTKLTVLGQPKAAPSVTLFPPSSEELQANKATLVCLISDFYPGAVTVAWKADSSPVKAGVETTTPSKQSNNKYAASSYLSLTPEQWKSHRSYSCQVTHEGSTVEKTVAPTECS

SEQ ID NO: 434 - protein, 214 aa, Artificial Sequence
  Synthetic polypeptide representing artificial human antibody VL chain
YIQMTQSPSTLSASVGDRVTITCRASQSISSWLAWFQQKPGKAPKLLIYKASTLESGVPSRFSGSESGTEFTLTIGSLQPDDFATYYCQQYNSYPRTFGQGTKVDIKRTVAAPSVFIFPPSDEQLKSGTASVVCLLNNFYPREAKVQWKVDNALQSGNSQESVTEQDSKDSTYSLSSTLTLSKADYEKHKVYACEVTHQGLSSPVTKSFNRGEC

SEQ ID NO: 435 - protein, 220 aa, Artificial Sequence
  Synthetic polypeptide representing artificial human antibody VL chain
DIVMTQSPDSLAVTLGERATINCRSSQTVLYDSNNKNYLAWYQQKPGQPPKLLIYWASIRESGVPDRFSGSGSGTDFTLTINTLQAEDVAIYFCQQYFTTPRTFGQGTKVEIKRTVAAPSVFIFPPSDEQLKSGTASVVCLLNNFYPREAKVQWKVDNALQSGNSQESVTEQDSKDSTYSLSSTLTLSKADYEKHKVYACEVTHQGLSSPVTKSFNRGEL

SEQ ID NO: 436 - protein, 217 aa, Artificial Sequence
  Synthetic polypeptide representing artificial human antibody VL chain
PAVLTQPPSVSGTPGQRVTISCSGGSSNIGGKYVYWYQQLPGTAPKVVIYRNNQRPSGVSDRFSGSKSGISASLTISGLRSEDEAVYYCAAWDDGLGGLYVFGTGTKVTALGQPKANPTVTLFPPSSEELQANKATLVCLISDFYPGAVTVAWKADGSPVKAGVETTKPSKQSNNKYAASSYLSLTPEQWKSHRSYSCQVTHEGSTVEKTVAPTECS

SEQ ID NO: 437 - protein, 213 aa, Artificial Sequence
  Synthetic polypeptide representing artificial human antibody VL chain
DIQMTQSPSTLSASVGDRVTISCRASQSISDWLAWYQQKPGKAPKLLIYAASILQSGVPSRFSGSGSGTEFTLTISSLQTDDFATYYCQQYNRGSTFGPGTKVDIKRTVAAPSVFIFPPSDEQLKSGTASVVCLLNNFYPREAKVQWKVDNALQSGNSQESVTEQDSKDSTYSLSSTLTLSKADYEKHKVYACEVTHQGLSSPVTKSFNRGEW

SEQ ID NO: 438 - protein, 214 aa, Artificial Sequence
  Synthetic polypeptide representing artificial human antibody VL chain
SYVLPQPPSVSVAPGQTAKITCGGNNPGIKSVHWYQQRPGQAPVLVIYDDSDRPSGIPERFSGSNSGNTVTLTISWVEAGDEADYYCQVWDRNSHRVIFGGGTKLTVLGQPKAAPSVTLFPPSSEELQANKATLVCLISDFYPGAVTVAWKADSSPVKAGVETTTPSKQSNNKYAASSYLSLTPEQWKSHRSYSCQVTHEGSTVEKTVAPTECS

SEQ ID NO: 439 - protein, 217 aa, Artificial Sequence
  Synthetic polypeptide representing artificial human antibody VL chain
PSVLTQPPSVSGAPGQRVTISCTGSTSNIGADYDVHWYQQLPRTAPKLLIYANNNRPSGVPDRFSGSKSGTSASLAITGLQAEDEADYYCQSYDNSLSAWVFGGGTKLTVLGQPKAAPSVTLFPPSSEELQANKATLVCLISDFYPGAVTVAWKADSSPVKAGVETTTPSKQSNNKYAASSYLSLTPEQWKSHKSYSCQVTHEGSTVEKTVAPTECS

SEQ ID NO: 440 - protein, 214 aa, Artificial Sequence
  Synthetic polypeptide representing artificial human antibody VL chain
SSELTQDPAVSVALGQTVRITCQGDSLRSFYGSWYQQKPGQAPVLVIYGENNRPSGIPDRFSGSSSGNTASLTITGAQAEDEADYYCNSRDSSGNHWVFGGGTKLTVLGQPKAAPSVTLFPPSSEELQANKATLVCLISDFYPGAVTVAWKADSSPVKAGVETTTPSKQSNNKYAASSYLSLTPEQWKSHKSYSCQVTHEGSTVEKTVAPTECS

SEQ ID NO: 441 - protein, 217 aa, Artificial Sequence
  Synthetic polypeptide representing artificial human antibody VL chain
QSALTQPASVSGSPGQSITISCTGISSDVDGYNYVSWYQLYSGKAPKLIIYDVTNRPSGVSHRFSGSKSGNTASLTISGLQAEDEADYYCSSYIRSSTPVVFGGGTKLTVLGQPKAAPSVTLFPPSSEELQANKATLVCLISDFYPGAVTVAWKADSSPVKAGVETTTPSKQSNNKYAASSYLSLTPEQWKSHRSYSCQVTHEGSTVEKTVAPTECS

SEQ ID NO: 442 - protein, 220 aa, Artificial Sequence
  Synthetic polypeptide representing artificial human antibody VL chain
DIVMTQSPDSLAVSLGERATINCKSSQSVLYSSDNKNYLAWYQQKPGQPPKLLIYWASTRESGVPDRFSGSGSGTDFTLTISSLEAEDVAVYYCQQYYDTPYTFGQGTKLEIKRTVAAPSVFIFPPSDEQLKSGTASVVCLLNNFYPREAKVQWKVDNALQSGNSQESVTEQDSKDSTYSLSSTLTLSKADYEKHKVYACEVTHQGLSSPVTKSFNRGEC

SEQ ID NO: 443 - protein, 216 aa, Artificial Sequence
  Synthetic polypeptide representing artificial human antibody VL chain
ASALTQPASVSGSPGQSITISCTGTSSDVGGYNYVSWYQQHPGKAPKLMIYEVSNRPSGVSNRFSGSKSGNTASLTISGLQAEDEADYYCSSYTSSSTLVFGGGTKLTVLGQPKAAPSVTLFPPSSEELQANKATLVCLISDFYPGAVTVAWKADSSPVKAGVETTTPSKQSNNKYAASSYLSLTPEQWKSHKSYSCQVTHEGSTVEKTVAPTECS

SEQ ID NO: 444 - protein, 213 aa, Artificial Sequence
  Synthetic polypeptide representing artificial human antibody VL chain
DIQMTQSPSSLSASVGDRVTITCQASQDISNYLNWYQQKPGKAPKLLIYDASNLETGVPSRFSGSGSGTDFTFTISSLQPEDIATYYCQQYDNLWTFGQGTKVEIKRTVAAPSVFIFPPSDEQLKSGTASVVCLLNNFYPREAKVQWKVDNALQSGNSQESVTEQDSKDSTYSLSSTLTLSKADYEKHKVYACEVTHQGLSSPVTKSFNRGEC

SEQ ID NO: 445 - protein, 215 aa, Artificial Sequence
  Synthetic polypeptide representing artificial human antibody VL chain
PYVLTQPPSVSVAPGQTARITCGGNNIGSKSVHWYQQKPGQAPVLVVYDDSDRPSGIPERFSGSNSGNTATLTISRVEAGDEADYYCQVWDSSSDHLYVFGTGTKVTVLGQPKANPTVTLFPPSSEELQANKATLVCLISDFYPGAVTVAWKADGSPVKAGVETTKPSKQSNNKYAASSYLSLTPEQWKSHRSYSCQVTHEGSTVEKTVAPTECS

SEQ ID NO: 446 - protein, 215 aa, Artificial Sequence
  Synthetic polypeptide representing artificial human antibody VL chain
EIVLAQSPGTLYLSPGERATLSCRASQSVRGNYLAWYQQRPGQAPRLLIYGASSRATGIPDRFGGSGSGTDFTLTITRLLPEDFAVYYCHQYGSSPRTFGQGTKVEIKRTVAAPSVFIFPPSDEQLKSGTASVVCLLNNFYPREAKVQWKVDNALQSGNSQESVTEQDSKDSTYSLSSTLTLSKADYEKHKVYACEVTHQGLSSPVTKSFNRGEC

SEQ ID NO: 447 - protein, 217 aa, Artificial Sequence
  Synthetic polypeptide representing artificial human antibody VL chain
QSVLTQPPSVSAATGQKVTISCSGGSSNIGSNYVSWYQQLPGTAPKLLIFENNKRPSGIPDRFSGSKSGTSATLGITGLQTGDEADYYCGTWDSSLTGGFVFGTGTKVTVLGQPKANPTVTLFPPSSEELQANKATLVCLISDFYPGAVTVAWKADGSPVKAGVETTKPSKQSNNKYAASSYLSLTPEQWKSHRSYSCQVTHEGSTVEKTVAPTECS

SEQ ID NO: 448 - protein, 214 aa, Artificial Sequence
  Synthetic polypeptide representing artificial human antibody VL chain
SYVLTQPPSVSVAPGKTATIACGENNIGSYNVNWYQQRPGQAPVLVIHSDSDRPSGISERFSGSNSGNTATLTISRVEAGDEADYYCQVWDTSNDVGVFGGGTKLTVLGQPKAAPSVTLFPPSSEELQANKATLVCLISDFYPGAVTVAWKADSSPVKAGVETTTPSKQSNNKYAASSYLSLTPEQWKSHRSYSCQVTHEGSTVEKTVAPTECS

SEQ ID NO: 449 - protein, 215 aa, Artificial Sequence
  Synthetic polypeptide representing artificial human antibody VL chain
EIVLTQSPGTLSLSPGGRATLSCRASQRVSSNYLAWYQQKPGQAPRLLIYGPSSRATGVPDRFSSSGSGTDFTLSISRLEPEDFAVYFCQQYGSSPPTFGGGTKVEIKRTVAAPSVFIFPPSDEQLKSGTASVVCLLNNFYPREAKVQWKVDNALQSGNSQESVTEQDSKDSTYSLSSTLTLSKADYEKHKVYACEVTHQGLSSPVTKSFNRGEC

SEQ ID NO: 450 - protein, 216 aa, Artificial Sequence
  Synthetic polypeptide representing artificial human antibody VL chain
ASALTQPASVSGSPGQSITISCTGTSSDVGSYNLVSWYQQHPGKAPELMIYEGSKRPSGVSNRFSGSKSGNTASLTISGLQAEDEADYYCCSYAGSSNWVFGGGTKLTVLGQPKAAPSVTLFPPSSEELQANKATLVCLISDFYPGAVTVAWKADSSPVKAGVETTTPSKQSNNKYAASSYLSLTPEQWKSHKSYSCQVTHEGSTVEKTVAPTECS

SEQ ID NO: 451 - protein, 218 aa, Artificial Sequence
  Synthetic polypeptide representing artificial human antibody VL chain
DVVMTQSPLYLPVTLGQPASISCRASQSLVYSDGNTYLNWVHQRPGQSPRRLIYMVSQRGSGVPDRFSGSGSDTDFTLKISRVEAEDVGVYYCMQGTHWSAFGQGTKLEIKRTVAAPSVFIFPPSDEQLKSGTASVVCLLNNFYPREAKVQWKVDNALQSGNSQESVTEQDSKDSTYSLSSTLTLSKADYEKHKVYACEVTHQGLSSPVTKSFNRGEC

SEQ ID NO: 452 - protein, 216 aa, Artificial Sequence
  Synthetic polypeptide representing artificial human antibody VL chain
PSVLTQPPSASGTPGQRVTISCSGSSSNIGSNYVYWYQQLPGTAPKLLIYRNNQRPSGVPDRFSGSKSGTSASLAISGLRSEDEADYYCAAWDDSLSGQVFGGGTKLTVLGQPKAAPSVTLFPPSSEELQANKATLVCLISDFYPGAVTVAWKADSSPVKAGVETTTPSKQSNNKYAASSYLSLTPEQWKSHKSYSCQVTHEGSTVEKTVAPTECS

SEQ ID NO: 453 - protein, 214 aa, Artificial Sequence
  Synthetic polypeptide representing artificial human antibody VL chain
VSSELTQDPAVSVALGQTVRITCQGDSLRSYYASWYQQRPGQAPVLVIYGKNNRPSGIPDRFSGSSSGNTASLTITGAQAEDEADYYCNSRDSSGNHVFGTGTKVTVLGQPKANPTVTLFPPSSEELQANKATLVCLISDFYPGAVTVAWKADGSPVKAGVETTKPSKQSNNKYAASSYLSLTPEQWKSHRSYSCQVTHEGSTVEKTVAPTECS

SEQ ID NO: 454 - protein, 213 aa, Artificial Sequence
  Synthetic polypeptide representing artificial human antibody VL chain
DIQMTQSPSSLSASVGDRVTITCRASQSISSYLNWYQQKPGKAPKLLIYAASSLQSGVPSRFSGSGSGTDFTLTISSLQPEDFATYYCQQSYSTPTFGQGTRLEIKRTVAAPSVFIFPPSDEQLKSGTASVVCLLNNFYPREAKVQWKVDNALQSGNSQESVTEQDSKDSTYSLSSTLTLSKADYEKHKVYACEVTHQGLSSPVTKSFNRGEC

SEQ ID NO: 455 - protein, 213 aa, Artificial Sequence
  Synthetic polypeptide representing artificial human antibody VL chain
YVLTQPPSVSVAPGQTARITCGGNNIGYRNVYWYHQKPGQAPVLVVYDDSDRPSGIPERFSGSNSGNTATLTISRVEAGDEADYFCQVWESGGDHPVFGGGTKLTVLGQPKAAPSVTLFPPSSEELQANKATLVCLISDFYPGAVTVAWKADSSPVKAGVETTTPSKQSNNKYAASSYLSLTPEQWKSHRSYSCQVTHEGSTVEKTVAPTECS

SEQ ID NO: 456 - protein, 214 aa, Artificial Sequence
  Synthetic polypeptide representing artificial human antibody VL chain
DIQMTQSPSSLSASVGDRVTITCRASQGIRNDLGWFQQKPGKAPKRLIYAASNLPSGVSSRFSGSGSGTEFTLTISSLQPEDFATYYCLQHNNYPLTFGQGTKVEFKRTVAAPSVFIFPPSDEQLKSGTASVVCLLNNFYPREAKVQWKVDNALQSGNSQESVTEQDSKDSTYSLSSTLTLSKADYEKHKVYACEVTHQGLSSPVTKSFNRGEC

SEQ ID NO: 457 - protein, 214 aa, Artificial Sequence
  Synthetic polypeptide representing artificial human antibody VL chain
DIQMTQSPSTLSASVGDRVTITCRASQSISSWLAWYQQKPGKAPKLLIYDASSLESGVPSRFSGSGSGTEFTLTISSLQPDDFATFYCQQYNSYPYTFGQGTKLEIKRTVAAPSVFIFPPSDEQLKSGTASVVCLLNNFYPREAKVQWKVDNALQSGNSQESVTEQDSKDSTYSLSSTLTLSKADYEKHKVYACEVTHQGLSSPVTKSFNRGEC

SEQ ID NO: 458 - protein, 219 aa, Artificial Sequence
  Synthetic polypeptide representing artificial human antibody VL chain
DIVMTQSPLSLPVTPGEPASISCRSSQSLLHSNGFNYLDWYLQKPGQSPQLLIYLGSNRASGVPDRFSGSGSGTDFTLKISRVEAEDVGVYYCMQALQIPRTFGQGTKVEIKRTVAAPSVFIFPPSDEQLKSGTASVVCLLNNFYPREAKVQWKVDNALQSGNSQESVTEQDSKDSTYSLSSTLTLSKADYEKHKVYACEVTHQGLSSPVTKSFNRGEC

SEQ ID NO: 459 - protein, 212 aa, Artificial Sequence
  Synthetic polypeptide representing artificial human antibody VL chain
PYELTQPPSVSVSPGQTASITCSGDKLGDKYACWYQQKPGQSPVLVIYQDSKRPSGIPERFSGSNSGNTATLTISGTQAMDEADYYCQAWDSNVHVFGTGTKVTVLGQPKANPTVTLFPPSSEELQANKATLVCLISDFYPGAVTVAWKADGSPVKAGVETTKPSKQSNNKYAASSYLSLTPEQWKSHRSYSCQVTHEGSTVEKTVAPTECS

SEQ ID NO: 460 - protein, 214 aa, Artificial Sequence
  Synthetic polypeptide representing artificial human antibody VL chain
SYELTQPPSVSVSPGQTARITCSGDALPKKYAFWYQQKSGQAPVLVIYEDSKRPSGIPERFSGSSSGTMATLTISGAQVEDESDYYCYSTDSSGNVWVFGGGTKLTVLGQPKAAPSVTLFPPSSEELQANKATLVCLISDFYPGAVTVAWKADSSPVKAGVETTTPSKQSNNKYAASSYLSLTPEQWKSHRSYSCQVTHEGSTVEKTVAPTECS

SEQ ID NO: 461 - protein, 215 aa, Artificial Sequence
  Synthetic polypeptide representing artificial human antibody VL chain
VSSELTQDPAVSVALGQTVRITCQGDSLRSYYASWYQQKPGQAPVLVIYGKNNRPSGIPDRFSGSSSGNTASLTITGAQAEDEADYYCNSRDSSGNLYVFGTGTKVTVLGQPKANPTVTLFPPSSEELQANKATLVCLISDFYPGAVTVAWKADGSPVKAGVETTKPSKQSNNKYAASSYLSLTPEQWKSHRSYSCQVTHEGSTVEKTVAPTECS

SEQ ID NO: 462 - protein, 220 aa, Artificial Sequence
  Synthetic polypeptide representing artificial human antibody VL chain
DIAMTQSPDSLAVSLGERATINCKSSQSVLYSSSSKNYLAWYQQKPGQPPKLLIYWASTRESGVPDRFSGSGSGTDFTLTISSLQAEDVAVYYCQQYYSSPLTFGGGTKVEIKRTVAAPSVFIFPPSDEQLKSGTASVVCLLNNFYPREAKVQWKVDNALQSGNSQESVTEQDSKDSTYSLSSTLTLSKADYEKHKVYACEVTHQGLSSPVTKSFNRGEC

SEQ ID NO: 463 - protein, 220 aa, Artificial Sequence
  Synthetic polypeptide representing artificial human antibody VL chain
DIVMTQSPLSLPVTPGEPASISCRSSQSLLHSNGYNYLDWYLQKPGQSPQLLIYLGSNRASGVPDRFSGSGSGTDFTLKISRVEADDVGVYYCMQALQTPPYTFGQGTKLEIKRTVAAPSVFIFPPSDEQLKSGTASVVCLLNNFYPREAKVQWKVDNALQSGNSQESVTEQDSKDSTYSLSSTLTLSKADYEKHKVYACEVTHQGLSSPVTKSFNRGEC

SEQ ID NO: 464 - protein, 216 aa, Artificial Sequence
  Synthetic polypeptide representing artificial human antibody VL chain
ASALTQPASVSGSPGQSITISCTGTSSDVGGYNYVSWYQQHPGKAPQLMIFDVSNRPSGVSNRFSGSKSGDTASLTISGLQAEDEADYYCSSYTSSSTWVFGGGTKLTVLGQPKAAPSVTLFPPSSEELQANKATLVCLISDFYPGAVTVAWKADSSPVKAGVETTTPSKQSNNKYAASSYLSLTPEQWKSHKSYSCQVTHEGSTVEKTVAPTECS

SEQ ID NO: 465 - protein, 220 aa, Artificial Sequence
  Synthetic polypeptide representing artificial human antibody VL chain
DIVMTQSPDSLAVSLGERATINCKSSQSVLYSSNNKNYLGWYQQKPGEPPKLVIHWASTRESGVPDRFSGSGSGTDFTLTISSLQAEDVAVYYCQQSYSTPYTFGQGTKLEIKRTVAAPSVFIFPPSDEQLKSGTASVVCLLNNFYPREAKVQWKVDNALQSGNSQESVTEQDSKDSTYSLSSTLTLSKADYEKHKVYACEVTHQGLSSPVTKSFNRGEC

SEQ ID NO: 466 - protein, 111 aa, Artificial Sequence
  Synthetic polypeptide representing artificial human antibody VL chain
QSALTQPASVSGSPGQSITISCTGTSSDVGSYNLVSWYQQHPGKAPKLMIYEGSKRPSGVSNRFSGSKSGNTASLTISGLQAEDEADYYCCSYAGSSTPWVFGGGTKLTVL

SEQ ID NO: 467 - protein, 214 aa, Artificial Sequence
  Synthetic polypeptide representing artificial human antibody VL chain
PYELTQPPSVSLSPGQTARITCSGDALPKKYAYWYQQKSGQAPVLVIYEDSKRPSGIPERFSGSSSGTTATLTISGAQVDDEGDYYCYSPDSSGNVWVFGGGTKLTVLGQPKAAPSVTLFPPSSEELQANKATLVCLISDFYPGAVTVAWKADSSPVKAGVETTTPSKQSNNKYAASSYLSLTPEQWKSHKSYSCQVTHEGSTVEKTVAPTECS

SEQ ID NO: 468 - protein, 103 aa, Artificial Sequence
  Synthetic polypeptide representing artificial human antibody VL chain
EIVMTQSPATLSVSPGERATLSCRASQSVSSNLAWYQQKPGQAPRLLIYGASTRATGLPARFSGSGSGTEFTLTISSLQSEDFAVYYCQSRGTFGGGTKVEIK

SEQ ID NO: 469 - protein, 109 aa, Artificial Sequence
  Synthetic polypeptide representing artificial human antibody VL chain
EIVLTQSPVTLSLSPGERATLSCRASQSVSSSYIAWYQQKPGQAPRLLIYGASTRATGIPDRFSGSGSGTDFTLTISRLEPEDCAVFYCQQYGSSHYTFGQGTKLEIKR

SEQ ID NO: 470 - protein, 215 aa, Artificial Sequence
  Synthetic polypeptide representing artificial human antibody VL chain
SYVLTQPPSVSVAPGKTARITCGGDNIGSRSVHWYQQKPGQAPVLVIYYDSDRPSGIPERFSGSNSGNTATLTISRVEAGDEADYYCQVWDSSSDHPWVFGGGTKLTVLRQPKAAPSVTLFPPSSEELQANKATLVCLISDFYPGAVTVAWKADSSPVKAGVETTTPSKQSNNKYAASSYLSLTPEQWKSHKSYSCQVTHEGSTVEKTVAPTECS

SEQ ID NO: 471 - protein, 111 aa, Artificial Sequence
  Synthetic polypeptide representing artificial human antibody VL chain
QSALTQPASVSGSPGQSITISCTGTSSDIGTYNLVSWYQQRPGKAPKLIIYDVIKRPSGISDRFSGSKSDNMASLTISGLQAEDEAHYYCCSYRSSTAPVVFGGGTKVTVL

SEQ ID NO: 472 - protein, 113 aa, Artificial Sequence
  Synthetic polypeptide representing artificial human antibody VL chain
GIVMTQSPDSLAVSLGERATINCKSSQSVLSTSNNKNYLAWYQQKPGQPPKLLIYWASTRESGVPDRFSGSGSGTDFTLTISSLQAEDVAVYYCQQYFSTPWTFGQGTKVEIK

SEQ ID NO: 473 - protein, 214 aa, Artificial Sequence
  Synthetic polypeptide representing artificial human antibody VL chain
SYVLTQPPSVSVAPGQTARITCGGNNIGSKSVHWYQQKPGQAPVLVVYDDSDRPSGIPERFSGSNSGNTATLTISRVEAGDEADYYCQVWDGYSDPLVFGGGTKLTVLGQPKAAPSVTLFPPSSEELQANKATLVCLISDFYPGAVTVAWKADSSPVKAGVETTTPSKQSNNKYAASSYLSLTPEQWKSHKSYSCQVTHEGSTVEKTVAPTECS

SEQ ID NO: 474 - protein, 214 aa, Artificial Sequence
  Synthetic polypeptide representing artificial human antibody VL chain
EVQMTQSPSSLSASVGDRVTITCRASQHIAGRLNWYQQKPGKAPKLLIHSASSVQREVPSRFGGSGFGTDFTLTIYSLQAEDFATYFCQQSYYTPPTFAGGTRVDLKRTVAAPSVFIFPPSDEQLKSGTASVVCLLNNFYPREAKVQWKVDNALQSGNSQESVTEQDSKDSTYSLSSTLTLSKADYEKHKVYACEVTHQGLSSPVTKSFNRGEC

SEQ ID NO: 475 - protein, 217 aa, Artificial Sequence
  Synthetic polypeptide representing artificial human antibody VL chain
RSVLTQPPSASGTPGQRVTISCSGSSSNIGSNTVNWYQQLPGTAPKLLIYSNNQRPSGVPDRFSGSKSGTSASLAISGLQSEDEADYYCAAWDDSLNGLWVFGGGTKLTVLGQPKAAPSVTLFPPSSEELQANKATLVCLISDFYPGAVTVAWKADSSPVKAGVETTTPSKQSNNKYAASSYLSLTPEQWKSHKSYSCQVTHEGSTVEKTVAPTECS

SEQ ID NO: 476 - protein, 217 aa, Artificial Sequence
  Synthetic polypeptide representing artificial human antibody VL chain
DFLLTQPHSVSESPGKTVTISCTRSSGSIASNYVQWYQQRPGSSPSTVIYEDHQRPSGVPGRFSGSIDSSSNSASLTISGLKTEDEADYFCQSSDSNNHVVFGGGTKLTVLGQPKAAPSVTLFPPSSEELQANKATLVCLISDFYPGAVTVAWKADSSPVKAGVETTTPSKQSNNKYAASSYLSLTPEQWKSHRSYSCQVTHEGSTVEKTVAPTECS

SEQ ID NO: 477 - protein, 217 aa, Artificial Sequence
  Synthetic polypeptide representing artificial human antibody VL chain
RSVLTQPPSVSGAPGQRVTISCTGSSSNIGAHYDVHWYQQLPGTAPKLLIYGNSNRPSGVPDRFSGSKSGTSASLAITGLQAEDEADYYCQSYDSSLSGVLFGGGTKLTVLGQPKAAPSVTLFPPSSEELQANKATLVCLISDFYPGAVTVAWKADSSPVKAGVETTTPSKQSNNKYAASSYLSLTPEQWKSHRSYSCQVTHEGSTVEKTVAPTECS

SEQ ID NO: 478 - protein, 214 aa, Artificial Sequence
  Synthetic polypeptide representing artificial human antibody VL chain
DIQMTQSPSSLSASVGDRVTITCRASQSISSYLNWYQQKPGKAPKFLIYAASSLQSGVPSRFSGSGSGTDFTLTISSLQPEDFATYYCQQSYSTPFTFGPGTKVDLKRTVAAPSVFIFPPSDEQLKSGTASVVCLLNNFYPREAKVQWKVDNALQSGNSQESVTEQDSKDSTYSLSSTLTLSKADYEKHKVYACEVTHQGLSSPVTKSFNRGEC

SEQ ID NO: 479 - protein, 214 aa, Artificial Sequence
  Synthetic polypeptide representing artificial human antibody VL chain
DIQMTQSPPSLSASVGDRVTITCQASQDISNYLNWYQQKPGKTPKLLIYAASTLETGVPSRFSGSGSGTDFTFTINSLQPEDIATYYCQQYDSLPLTFGGGTKVEIKRTVAAPSVFIFPPSDEQLKSGTASVVCLLNNFYPREAKVQWKVDNALQSGNSQESVTEQDSKDSTYSLSSTLTLSKADYEKHKVYACEVTHQGLSSPVTKSFNRGEC

SEQ ID NO: 480 - protein, 216 aa, Artificial Sequence
  Synthetic polypeptide representing artificial human antibody VL chain
EIVLTQSPGTLSLSPGHRATLSCRASQDVASTYLAWYQQKPGQAPRLLIYGASSRATGIPDRFSGSGSGTDFTLTISRLEPEDFAVFYCQYYGGSPGFTFGPGTKVDFKRTVAAPSVFIFPPSDEQLKSGTASVVCLLNNFYPREAKVQWKVDNALQSGNSQESVTEQDSKDSTYSLSSTLTLSKADYEKHKVYACEVTHQGLSSPVTKSFNRGEC

SEQ ID NO: 481 - protein, 216 aa, Artificial Sequence
  Synthetic polypeptide representing artificial human antibody VL chain
QSALTQPASVSGSPGQSITISCTGTTSDVGTYNLVSWYQQLPGKAPKLIIYEVTKRPSGVSNRFSASKSGSTASLTISGLQAEDEADYYCCSYAGSSTYVFGSGARVTVLGQPKANPTVTLFPPSSEELQANKATLVCLISDFYPGAVTVAWKADGSPVKAGVETTKPSKQSNNKYAASSYLSLTPEQWKSHRSYSCQVTHEGSTVEKTVAPTECS

SEQ ID NO: 482 - protein, 216 aa, Artificial Sequence
  Synthetic polypeptide representing artificial human antibody VL chain
EIVLTQSPGTLSLSPGETATLSCRASQSVANNYLAWHQQKPGQAPRLLIYGASKRAAGIPDRFSGSGSGTEFTLTISRLEPEDCAVYYCQEYVKSPGFAFGPGTRVDIKRTVAAPSVFIFPPSDEQLKSGTASVVCLLNNFYPREAKVQWKVDNALQSGNSQESVTEQDSKDSTYSLSSTLTLSKADYEKHKVYACEVTHQGLSSPVTKSFNRGEC

SEQ ID NO: 483 - protein, 215 aa, Artificial Sequence
  Synthetic polypeptide representing artificial human antibody VL chain
EIVLTQSPATLSLSPGERATLSCRASQSVSSNYLAWYQQKPGQAPRLLIHGASSRATGFPDRFSGSGSGTDFTLTINRLEPEDFAVYYCQQYGTSPQTFGQGTKVEIKRTVAAPSVFIFPPSDEQLKSGTASVVCLLNNFYPREAKVQWKVDNALQSGNSQESVTEQDSKDSTYSLSSTLTLSKADYEKHKVYACEVTHQGLSSPVTKSFNRGEC

SEQ ID NO: 484 - protein, 216 aa, Artificial Sequence
  Synthetic polypeptide representing artificial human antibody VL chain
QTVVTQEPSFSVSPGGTVTFTCAWSSGSVSTSFYTSWYRQTPGQAPQTLIYNTNRRSSGVPDRFSGSILGNKAALTITGAQADDDSDYYCMLYMGSGISLFGGGTKLTVLGQPKAAPSVTLFPPSSEELQANKATLVCLISDFYPGAVTVAWKADSSPVKAGVETTTPSKQSNNKYAASSYLSLTPEQWKSHRSYSCQVTHEGSTVEKTVAPTECS

SEQ ID NO: 485 - protein, 218 aa, Artificial Sequence
  Synthetic polypeptide representing artificial human antibody VL chain
QSVLTQPPSVSGAPGQRVTISCTGSSSNIGAQYDVHWYKVIPGTAPKLLIYGNDNRPSGVPDRFSGSKSGTSASLAITGLQSEDEADYYCQSNDISLSGSVVFGGGTKLTVLGQPKAAPSVTLFPPSSEELQANKATLVCLISDFYPGAVTVAWKADSSPVKAGVETTTPSKQSNNKYAASSYLSLTPEQWKSHRSYSCQVTHEGSTVEKTVAPTECS

SEQ ID NO: 486 - protein, 217 aa, Artificial Sequence
  Synthetic polypeptide representing artificial human antibody VL chain
PSVLTQPPSVSGAPGQRVTISCTGSSSNIGAGYDVHWYQQLPGTAPKLLIYANTNRPSGVPDRFSGSKSGTSASLAITGLQAEDEADYYCQSYDNSLSGGVFGGGTKLTVLGQPKAAPSVTLFPPSSEELQANKATLVCLISDFYPGAVTVAWKADSSPVKAGVETTTPSKQSNNKYAASSYLSLTPEQWKSHRSYSCQVTHEGSTVEKTVAPTECS

SEQ ID NO: 487 - protein, 215 aa, Artificial Sequence
  Synthetic polypeptide representing artificial human antibody VL chain
KIVLTQSPGTLSLSPGERATLSCRASQSVSSSYLAWYQQRPGQSPRLLIYETSTRATGIPDRFSGSGSGTDFTLTISGLEPEDFAVYYCQQFDISPFTFGPGTKVDVKRTVAAPSVFIFPPSDEQLKSGTASVVCLLNNFYPREAKVQWKVDNALQSGNSQESVTEQDSKDSTYSLSSTLTLSKADYEKHKVYACEVTHQGLSSPVTKSFNRGEC

SEQ ID NO: 488 - protein, 216 aa, Artificial Sequence
  Synthetic polypeptide representing artificial human antibody VL chain
QSALTQPASVSGSPGQSITISCTGTSSDVGGYNYVSWYQQHPGKAPKLMIYDVSNRPSGVSNRFSGSKSGNTASLTISGLQAEDEADYYCSSYTSSSSLVFGGGTKVTVLGQPKAAPSVTLFPPSSEELQANKATLVCLISDFYPGAVTVAWKADSSPVKAGVETTTPSKQSNNKYAASSYLSLTPEQWKSHKSYSCQVTHEGSTVEKTVAPTECS

SEQ ID NO: 489 - protein, 110 aa, Artificial Sequence
  Synthetic polypeptide representing artificial human antibody VL chain
QSALTQPASVSGSPGQSITISCTGTSSDIGGYDLVSWYQHHPGKAPKLVISEGSKRPSGVSNRFFGSKSGNTASLTISGLQAEDEADYYCCSFTGTSTFVFGTGTKVTVL

SEQ ID NO: 490 - protein, 113 aa, Artificial Sequence
  Synthetic polypeptide representing artificial human antibody VL chain
DIVMTQSPDSLAVSLGERATINCKSSQSVLYSSNNKNYLAWYQQKPGQPPKLLIYWASTRESGVPDRFSGSGSGTDFTLTISSLEPEDFAVYYCQQYYSTPYTFGQGTKLEIK

SEQ ID NO: 491 - protein, 216 aa, Artificial Sequence
  Synthetic polypeptide representing artificial human antibody VL chain
QSVLTQPPSASGTPGQRVTISCSGSSSNIGSNTVNWYQQFPGTAPKLLIYSNNHRPLGVPDRFSGSKSGTSASLAISEVRSEDEADYYCATWDDSLNGGVFGAGTKLTVVGQPKAAPSVTLFPPSSEELQANKATLVCLISDFYPGAVTVAWKADSSPVKAGVETTTPSKQSNNKYAASSYLSLTPEQWKSHRSYSCQVTHEGSTVEKTVAPTECS

SEQ ID NO: 492 - protein, 215 aa, Artificial Sequence
  Synthetic polypeptide representing artificial human antibody VL chain
PAVVTQEPSLTVSPGGTVTLTCGSSTGVVTTGHYPYWFQQKPGQAPTTLIFDTSNKHSWTPARFSGSLLGGKAALTLSAAQPEDEADYYCWLISGGAPVFGGGTKLTVLGQPKAAPSVTLFPPSSEELQANKATLVCLISDFYPGAVTVAWKADSSPVKAGVETTTPSKQSNNKYAASSYLSLTPEQWKSHRSYSCQVTHEGSTVEKTVAPTECS

SEQ ID NO: 493 - protein, 111 aa, Artificial Sequence
  Synthetic polypeptide representing artificial human antibody VL chain
QSVLTQPPSVSGAPGQRVTISCAGSYSNIGAGYDVHWYRQLPGTAPTLLIYSNNNRPSGVSDRFSGSKSGTSASLAITGLQAEDEADYYCQSFDSSLSRSVFGTGTKVTVL

SEQ ID NO: 494 - protein, 107 aa, Artificial Sequence
  Synthetic polypeptide representing artificial human antibody VL chain
EIVLTQSPATLSFSPGDRATLSCRASQNINRFLAWYQQKPGQTPRLLIYDASTRATGIPARFSGSGSGTDFSLIISSLEPEDFAIYYCQQRNNWPITFGPGTKVDVK

SEQ ID NO: 495 - protein, 214 aa, Artificial Sequence
  Synthetic polypeptide representing artificial human antibody VL chain
AIQMTQSPSSLSASVGDRVTITCRASQGIRNDLGWYQQKPGKAPKLLIYAASSLQSGVPSRFSGSGSGTDFTLTISSLQPEDFATYYCLQDYNYPPTFGQGTKVEIKRTVAAPSVFIFPPSDEQLKSGTASVVCLLNNFYPREAKVQWKVDNALQSGNSQESVTEQDSKDSTYSLSSTLTLSKADYEKHKLYACEVTHQGLSSPVTKSFNRGEC

SEQ ID NO: 496 - protein, 108 aa, Artificial Sequence
  Synthetic polypeptide representing artificial human antibody VL chain
SSELTQDPAVSVALGQTVRITCQGDSLRTDYATWYQQKPGQAPILVFYGEDNRPSGIPDRFSGSSSGNTASLTITGAQAEDEADYYCNSRDSSGHHWVFGGGTKLTVL

SEQ ID NO: 497 - protein, 113 aa, Artificial Sequence
  Synthetic polypeptide representing artificial human antibody VL chain
DIVMTQSPDSLAVSLGERATLNCKSSQSVLSSYNNKDYLAWFQQKPGQPPQLLFYWASTRKTGVPDRFSGSGSGTDFTLTISSLQTEDVAVYYCQQYYSTPYTFGQGTKLEIK

SEQ ID NO: 498 - protein, 220 aa, Artificial Sequence
  Synthetic polypeptide representing artificial human antibody VL chain
DVVMTQSPLSLPVTLGQAASISCRSSQSLVYSDGNTYLNWFQQRPGQSPRRLIYKVSNRESGVPDRFSGSGSGTDFTLQISRVEAEDVGIYYCMQGAHWPPITFGQGTRLEIKRTVAAPSVFIFPPSDEQLKSGTASVVCLLNNFYPREAKVQWKVDNALQSGNSQESVTEQDSKDSTYSLSSTLTLSKADYEKHKVYACEVTHQGLSSPVTKSFNRGEC

SEQ ID NO: 499 - protein, 107 aa, Artificial Sequence
  Synthetic polypeptide representing artificial human antibody VL chain
SYELTQPPSVSVSPGQTARITCSGDALPKKYVFWYQQRSGQAPVLVIYEDSKRPSGIPDRFSGSSSGTLATLTISGAQVEDEADYYCYSTDTIGNWVFGGGTRLTVL

SEQ ID NO: 500 - protein, 214 aa, Artificial Sequence
  Synthetic polypeptide representing artificial human antibody VL chain
LYVLTQPPSVSVAPGQTARITCGGNNIGSKSVHWYQQKPGQAPVLVVYDDSDRPSGIPERFSGSNSGNTATLTISRVEAGDEADYYCQVWDSSSDHWIFGGGTKLTVLGQPKAAPSVTLFPPSSEELQANKATLVCLISDFYPGAVTVAWKADSSPVKAGVETTTPSKQSNNKYAASSYLSLTPEQWKSHKSYSCQVTHEGSTVEKTVAPTECS

SEQ ID NO: 501 - protein, 214 aa, Artificial Sequence
  Synthetic polypeptide representing artificial human antibody VL chain
DIQMTQSPSSLSASVGDRVTITCRASQSISTYLNWYQQKPGKAPKLLIYAASNLQSGVPSTFSGSGSGTDFTLTISSLQPEDFATYYCQQSYSPPLTFGGGTTVEIKRTVAAPSVFIFPPSDEQLKSGTASVVCLLNNFYPREAKVQWKVDNALQSGNSQESVTEQDSKDSTYSLSSTLTLSKADYEKHKVYACEVTHQGLSSPVTKSFNRGEC

SEQ ID NO: 502 - protein, 215 aa, Artificial Sequence
  Synthetic polypeptide representing artificial human antibody VL chain
EIVMTQSPATLSVSQGERATLSCRASQSVGSDLAWYQQKPGQAPRLLIYDASARATDIPARFSGSGSETEFTLTISSLQSEDFAVYYCQHYSDWRALTFGGGTKVEIKRTVAAPSVFIFPPSDEQLKSGTASVVCLLNNFYPREAKVQWKVDNALQSGNSQESVTEQDSKDSTYSLSSTLTLSKADYEKHKVYACEVTHQGLSSPVTKSFNRGEC

SEQ ID NO: 503 - protein, 220 aa, Artificial Sequence
  Synthetic polypeptide representing artificial human antibody VL chain
GIVMTQSPDSLAVSLGERATINCRSSQSVLYSSNNKNYLAWYQQKPGQPPKLLIYWASTRESGVPDRFSGSGSGTDFTLTISSLQAEDVAVYYCQQYYGPLWTFGQGTRVEIRRTVAAPSVFIFPPSDEQLKSGTASVVCLLNNFYPREAKVQWKVDNALQSGNSQESVTEQDSKDSTYSLSSTLTLSKADYEKHKVYACEVTHQGLSSPVTKSFNRGEC

SEQ ID NO: 504 - protein, 214 aa, Artificial Sequence
  Synthetic polypeptide representing artificial human antibody VL chain
SDELTQPPSVSVSPGQTARITCSGDALAKEYAYWYQQKSGQAPVLVISKDTERPSGIPARFSGSSSGTTVTLTISGVQSDDEADYYCQSADSSLTYWLFGGGTKLTVLRQPKAAPSVTLFPPSSEELQANKATLVCLISDFYPGAVTVAWKADSSPVKAGVETTTPSKQSNNKYAASSYLSLTPEQWKSHKSYSCQVTHEGSTVEKTVAPTECS

SEQ ID NO: 505 - protein, 106 aa, Artificial Sequence
  Synthetic polypeptide representing artificial human antibody VL chain
DIQMTQAPSTLSASVGDRVSITCRASQNIRDFLAWYQQKPGRAPDLLIYRASTLEKGVSARFSGSGSGTEFTLTITGLQPDDFATYYCQQYSDYSTFGGGTRVEIK

SEQ ID NO: 506 - protein, 220 aa, Artificial Sequence
  Synthetic polypeptide representing artificial human antibody VL chain
DIVMTQSPDSLAVSLGERATITCKSSQTILYSSNNKNYLAWYQQKPGQPPKLLIYWASTRESGVPDRFSGSGSGTDFTLTISSLQAEDVAVYYCHQYYTTPFTFGPGTTVDIRRTVAAPSVFIFPPSDEQLKSGTASVVCLLNNFYPREAKVQWKVDNALQSGNSQESVTEQDSKDSTYSLSSTLTLSKADYEKHKVYACEVTHQGLSSPVTKSFNRGEC

SEQ ID NO: 507 - protein, 212 aa, Artificial Sequence
  Synthetic polypeptide representing artificial human antibody VL chain
SYELTQPPSVSVSPGQTASITCSGDKLGNKYVCWYQQKPGQSPVLVIYQDTKRPSGIPERFSGSKSGNTATLTISGTQALDEADYYCQAWDSSTAEFGGGTKLTVLGQPKAAPSVTLFPPSSEELQANKATLVCLISDFYPGAVTVAWKADSSPVKAGVETTTPSKQSNNKYAASSYLSLTPEQWKSHRSYSCQVTHEGSTVEKTVAPTECS

SEQ ID NO: 508 - protein, 216 aa, Artificial Sequence
  Synthetic polypeptide representing artificial human antibody VL chain
RSVLTQPPSASGTPGQTVTISCSGSRSNIGSNFVYWYQHLPGSAPKTTIHSNTQRPPGVPDRFSGSKSGTSASLAISGLRSEDEADYYCVTWDDDLHGWVFGGGTRLTVLGQPKAAPSVTLFPPSSEELQANKATLVCLISDFYPGAVTVAWKADSSPVKAGVETTTPSKQSNNKYAASSYLSLTPEQWKSHKSYSCQVTHEGSTVEKTVAPTECS

SEQ ID NO: 509 - protein, 218 aa, Artificial Sequence
  Synthetic polypeptide representing artificial human antibody VL chain
RSVLTQPPSVSAAPGQKVIISCSGSSSNIGNNYVSWYQQFLGTAPKLLIYDTDKRPSGIPDRFSGSKSGTSATLGITGLQTGDEAHYYCATWDSSLRAGPVVFGGGTKLTVLGQPKAAPSVTLFPPSSEELQANKATLVCLISDFYPGAVTVAWKADSSPVKAGVETTTPSKQSNNKYAASSYLSLTPEQWKSHRSYSCQVTHEGSTVEKTVAPTECS

SEQ ID NO: 510 - protein, 214 aa, Artificial Sequence
  Synthetic polypeptide representing artificial human antibody VL chain
DIQMTQSPSTLSASVGDRVTITCRASQSVSFWLAWYQQKPGKAPNLLISKASTLESGVPSRFSGSGSGTEFTLTISSLQPDDFATYYCQQYNAYPVTFGGGTKVEIRRTVAAPSVFIFPPSDEQLKSGTASVVCLLNNFYPREAKVQWKVDNALQSGNSQESVTEQDSKDSTYSLSSTLTLSKADYEKHKVYACEVTHQGLSSPVTKSFNRGEC

SEQ ID NO: 511 - protein, 220 aa, Artificial Sequence
  Synthetic polypeptide representing artificial human antibody VL chain
GIVMIQSPDSLAVSLGERATINCKSSQSVFYSSNNKNYLAWYQQKPGQPPKLLIYWASTRESGVPDRFSGSGSGTDFTLTLTSLQAEDVAVYYCQQYYSTPWTFGQGTKVEIKRTVAAPSVFIFPPSDEQLKSGTASVVCLLNNFYPREAKVQWKVDNALQSGNSQESVTEQDSKDSTYSLSSTLTLSKADYEKHKVYACEVTHQGLSSPVTKSFNRGEC

SEQ ID NO: 512 - protein, 220 aa, Artificial Sequence
  Synthetic polypeptide representing artificial human antibody VL chain
DIVMTQSPDSLAVSLGERAAINCKSSQSVLYSSNNKNYLAWYQQRPGQPPKLLIHWASMRESGVPDRFSGSGSGTDFTLTISSLQAEDVAIYYCQQYYSPPLTFGGGTKVEIKRTVAAPSVFIFPPSDEQLKSGTASVVCLLNNFYPREAKVQWKVDNALQSGNSQESVTEQDSKDSTYSLSSTLTLSKADYEKHKVYACEVTHQGLSSPVTKSFNRGEC

SEQ ID NO: 513 - protein, 110 aa, Artificial Sequence
  Synthetic polypeptide representing artificial human antibody VL chain
QSALTQPASVSGSPGQSITISCTGSSNDIGRYKYVSWFQHHPGRAPKLIIYEVNNRPSGLSHRFSGSKSGNTASLTISGLQAEDEADYYCCSYTSSLTYVFGTGTAVTVL

SEQ ID NO: 514 - protein, 219 aa, Artificial Sequence
  Synthetic polypeptide representing artificial human antibody VL chain
DVVMTQSPLSLPVTLGQPASISCRSSQSLVYSDGNTYLNWFQQRPGQSPRRLIYKVSNRDSGVPDRFSGSGSGTDFTLKISRVEAEDVGVYYCMQGTHWPYTFGQGTKLEIKRTVAAPSVFIFPPSDEQLKSGTASVVCLLNNFYPREAKVQWKVDNALQSGNSQESVTEQDSKDSTYSLSSTLTLSKADYEKHKVYACEVTHQGLSSPVTKSFNRGEC

SEQ ID NO: 515 - protein, 212 aa, Artificial Sequence
  Synthetic polypeptide representing artificial human antibody VL chain
PYELTQPPSVSVSPGQTASITCSGDKLGDKYACWYQQKPGQSPVLVIYQDSKRPSGIPERFSGSNSGNTATLTISGTQAMDEADYYCQAWDSSTYVFGTGTKVTVLGQPKANPTVTLFPPSSEELQANKATLVCLISDFYPGAVTVAWKADGSPVKAGVETTKPSKQSNNKYAASSYLSLTPEQWKSHRSYSCQVTHEGSTVEKTVAPTECS

SEQ ID NO: 516 - protein, 216 aa, Artificial Sequence
  Synthetic polypeptide representing artificial human antibody VL chain
ENVLTQSPGTLSLSPGERATLSCRASQRVNSNYLAWYQQKSGQAPRLLIYGASSRATGIPDRFSGSGSGTDFTLTISRLEPEDFAVYYCQQYGGSPLFTFGPGTKVDIKRTVAAPSVFIFPPSDEQLKSGTASVVCLLNNFYPREAKVQWKVDNALQSGNSQESVTEQDSKDSTYSLSSTLTLSKADYEKHKLYACEVTHQGLSSPVTKSFNRGEC

SEQ ID NO: 517 - protein, 106 aa, Artificial Sequence
  Synthetic polypeptide representing artificial human antibody VL chain
PYELTQPPSVSVSPGQTASIACSGDNLGNKYAWWYRQKPGQSPVLVMYKDNKRPSGIPERFSGSNSGNTATLTISGTQAMDEADYYCQTWDSSTVIFGGGTKLTVQ

SEQ ID NO: 518 - protein, 219 aa, Artificial Sequence
  Synthetic polypeptide representing artificial human antibody VL chain
DIVMTQSPLSLPVTPGEPASISCRSSQSLLHSNGYNYLDWYLQKPGQSPQLLIYLGSNRASGVPDRFSGSGSGTDFTLKISRVEAEDVGVYYCMQALQTPYTFGQGTKLEIKRTVAAPSVFIFPPSDEQLKSGTASVVCLLNNFYPREAKVQWKVDNALQSGNSQESVTEQDSKDSTYSLSSTLTLSKADYEKHKVYACEVTHQGLSSPVTKSFNRGEC

SEQ ID NO: 519 - protein, 216 aa, Artificial Sequence
  Synthetic polypeptide representing artificial human antibody VL chain
QSVLTQPPSVSAAPGQKVTISCSGSSSNIGNNYVSWYQQLPGTAPKLLIYDNNKRPSGIPDRFSGSKSGTSATLGITGLQTGDEADYYCGTWDSSLSAGVFGTGTKVTVLGQPKANPTVTLFPPSSEELQANKATLVCLISDFYPGAVTVAWKADSSPVKAGVETTTPSKQSNNKYAASSYLSLTPEQWKSHRSYSCQVTHEGSTVEKTVAPTECS

SEQ ID NO: 520 - protein, 213 aa, Artificial Sequence
  Synthetic polypeptide representing artificial human antibody VL chain
DIQMTQSPSTLSASVGDRVTITCRASQSISSWLAWYQQKPGKAPKLLIYKASSLESGVPSRFSGSGSGTEFTLTISSLQPDDFATYYCQQYNSYWTFGQGTKVEIKRTVAAPSVFIFPPSDEQLKSGTASVVCLLNNFYPREAKVQWKVDNALQSGNSQESVTEQDSKDSTYSLSSTLTLSKADYEKHKVYACEVTHQGLSSPVTKSFNRGEC

SEQ ID NO: 521 - protein, 214 aa, Artificial Sequence
  Synthetic polypeptide representing artificial human antibody VL chain
DIQMTQSPSTLSASVGDRVTITCRASQSISSWLAWYQQKPGKAPKLLIYKASSLESGVPSRFSGSGSGTEFTLTISSLQPDDFATYYCQQYNSYPWTFGQGTKVEIKRTVAAPSVFIFPPSDEQLKSGTASVVCLLNNFYPREAKVQWKVDNALQSGNSQESVTEQDSKDSTYSLSSTLTLSKADYEKHKVYACEVTHQGLSSPVTKSFNRGEC

SEQ ID NO: 522 - protein, 218 aa, Artificial Sequence
  Synthetic polypeptide representing artificial human antibody VL chain
PAVLTQPPSVSGAPGQRVTISCTGSSSNIGAGYDVHWYQQLPGTAPKLLIYGNSNRPSGVPDRFSGSKSGTSASLAITGLQAEDEADYYCQSYDSSLSGSGVFGGGTKLTVLGQPKAAPSVTLFPPSSEELQANKATLVCLISDFYPGAVTVAWKADSSPVKAGVETTTPSKQSNNKYAASSYLSLTPEQWKSHKSYSCQVTHEGSTVEKTVAPTECS

SEQ ID NO: 523 - protein, 213 aa, Artificial Sequence
  Synthetic polypeptide representing artificial human antibody VL chain
SYELTQPPSVSVSPGQTARITCSGDALPKQYAYWYQQKPGQAPVLVIYKDSERPSGIPERFSGSSSGTTVTLTISGVQAEDEADYYCQSADSSGTYVFGTGTKVTVLGQPKANPTVTLFPPSSEELQANKATLVCLISDFYPGAVTVAWKADGSPVKAGVETTKPSKQSNNKYAASSYLSLTPEQWKSHRSYSCQVTHEGSTVEKTVAPTECS

SEQ ID NO: 524 - protein, 102 aa, Artificial Sequence
  Synthetic polypeptide representing artificial human antibody VL chain
DIQMTQSPSSLSASVGDRVTFTCRASQNIRNNLAWYQLKPGKAPQLLIYSASSLETGVPSRFSGSGSGTDFTLAISSLQPEDFATYYCQQAHGFPITFGQGS

SEQ ID NO: 525 - protein, 106 aa, Artificial Sequence
  Synthetic polypeptide representing artificial human antibody VL chain
EIVMTQSPATLSVSPGERATLSCRASQSVSSNLAWYQQKPGQAPRLLIYGASTRATGIPARFSGSGSGTEFTLTISSLQSEDFAIYYCQQYNSWPAFGGGTKVEIK

SEQ ID NO: 526 - protein, 214 aa, Artificial Sequence
  Synthetic polypeptide representing artificial human antibody VL chain
DIQMTQSPSSLSASVGDRVTITCRASQSISSYLNWYQQKPGKAPKLLIYAASSLQSGVPSRFSGSGSGTDFTLTVSSLQPEDFATYYCQQSYNTPYTFGQGTKLEIKRTVAAPSVFIFPPSDEQLKSGTASVVCLLNNFYPREAKVQWKVDNALQSGNSQESVTEQDSKDSTYSLSSTLTLSKADYEKHKVYACEVTHQGLSSPVTKSFNRGEC

SEQ ID NO: 527 - protein, 214 aa, Artificial Sequence
  Synthetic polypeptide representing artificial human antibody VL chain
DIQMTQSPSSLSASVGDRVTITCRASQSISTYLNWYQQKPGMAPKLLIYAASTLQSGVPSRFSGSGSATDYTLTISSLQPEDFATYYCQQSYNTPLTFGGGTKVDIKRTVAAPSVFIFPPSDEQLKSGTASVVCLLNNFYPREAKVQWKVDNALQSGNSQESVTEQDSKDSTYSLSSTLTLSKADYEKHKLYACEVTHQGLSSPVTKSFNRGEC

SEQ ID NO: 528 - protein, 216 aa, Artificial Sequence
  Synthetic polypeptide representing artificial human antibody VL chain
EIVLTQSPGTLSLSPGERATLSCRASQSVTSSYLAWYQQKPGQAPRLLIYGASSRATGIPDRFSGSGSGTDFTLTISRLEPEDFAVYYCQQYGSSPPNSFGQGTKLEIKRTVAAPSVFIFPPSDEQLKSGTASVVCLLNNFYPREAKVQWKVDNALQSGNSQESVTEQDSKDSTYSLSSTLTLSKADYEKHKVYACEVTHQGLSSPVTKSFNRGEC

SEQ ID NO: 529 - protein, 108 aa, Artificial Sequence
  Synthetic polypeptide representing artificial human antibody VL chain
SYVLTQPPSVSVAPGKTARITCGGNNIGSKSVHWYQQKPGQAPVLVIYYDRDRPSGIPERFSGSNSGNTATLTISRVEAGDEADYYCQVWDSSSDHPVFGGGTKLTVL

SEQ ID NO: 530 - protein, 217 aa, Artificial Sequence
  Synthetic polypeptide representing artificial human antibody VL chain
NFMLTQPHSVSESPGKTVTISCTRSSGSIADKYVHWYRQRPGSSPTIVIYEDKQRPSGVPDRVSGAIDTSSNSASLTISGLKTEDEADYYCQSYDSNTHWVFGGGTKLTVLGQPKAAPSVTLFPPSSEELQANKATLVCLISDFYPGAVTVAWKADSSPVKAGVETTTPSKQSNNKYAASSYLSLTPEQWKSHRSYSCQVTHEGSTVEKTVAPTECS

SEQ ID NO: 531 - protein, 219 aa, Artificial Sequence
  Synthetic polypeptide representing artificial human antibody VL chain
DIVMTQSPLSLPVTPGEPASISCRSSQSLLHSNGYNYLDWYLQKPGQSPQLLIYLGSNRASGVPDRFSGSGSGTDFTLKISRVEAEDVGVYYCMQALETPRTFGGGTKVEIKRTVAAPSVFIFPPSDEQLKSGTASVVCLLNNFYPREAKVQWKVDNALQSGNSQESVTEQDSKDSTYSLSSTLTLSKADYEKHKVYACEVTHQGLSSPVTKSFNRGEC

SEQ ID NO: 532 - protein, 213 aa, Artificial Sequence
  Synthetic polypeptide representing artificial human antibody VL chain
DIQMTQSPSTLSASVGDRVTITCRASQSISSWLAWYQQKPGKAPKLLIYKASSLESGVPSRFSGSGSGTEFTLTISSLQPDDFATYYCQQYNSYSTFGQGTKVEIKRTVAAPSVFIFPPSDEQLKSGTASVVCLLNNFYPREAKVQWKVDNALQSGNSQESVTEQDSKDSTYSLSSTLTLSKADYEKHKVYACEVTHQGLSSPVTKSFNRGEC

SEQ ID NO: 533 - protein, 219 aa, Artificial Sequence
  Synthetic polypeptide representing artificial human antibody VL chain
GIAMTQSPRSLPVTPGEPASISCRSSQSLLYRDGEHYLDWYLQKPGQSPHLLIYSGSNRASGVPDRFSGSGSGTDFTLIISRVEAEDAGVYYCMQALQPPYTFGQGTKLEITRTVAAPSVFIFPPSDEQLKSGTASVVCLLNNFYPREAKVQWKVDNALQSGNSQESVTEQDSKDSTYSLSSTLTLSKADYEKHKLYACEVTHQGLSSPVTKSFNRGEC

SEQ ID NO: 534 - protein, 215 aa, Artificial Sequence
  Synthetic polypeptide representing artificial human antibody VL chain
DIQMTQSPSSLPASVGDRVTITCRASQSISSYLNWYQKKPGKAPKLLIDAASSLQSGVPSRFSGSGSGTDFTLTISSLQPEDFATYYCQQSYSTPPWTFGQGTKVEIKRTVAAPSVFIFPPSDEQLKSGTASVVCLLNNFYPREAKVQWKVDNALQSGNSQESVTEQDSKDSTYSLSSTLTLSKADYEKHKVYACEVTHQGLSSPVTKSFNRGEC

SEQ ID NO: 535 - protein, 220 aa, Artificial Sequence
  Synthetic polypeptide representing artificial human antibody VL chain
DIVMTQSPDSLSLSLGERATINCKSSQSLLYSSNYKNYLAWYQQKPGQPPKLLIYWASTRESGVPDRFSGSGSGTDFTLTISSLQAEDVAVYYCQQYYLVPVTFGQGTRLDIKRTVAAPSVFIFPPSDEQLKSGTASVVCLLNNFYPREAKVQWKVDNALQSGNSQESVTEQDSKDSTYSLSSTLTLSKADYEKHKVYACEVTHQGLSSPVTKSFNRGEC

SEQ ID NO: 536 - protein, 217 aa, Artificial Sequence
  Synthetic polypeptide representing artificial human antibody VL chain
ASVLTQPPSASGTPGQRVTISCSGSSSNIGSNYVYWYQQLPGTAPKLLIYRNNQRPSGVPDRFSGSKSGTSASLAISGLRSEDEADYYCAAWDDSLSGPYVFGTGTKVTVLGQPKANPTVTLFPPSSEELQANKATLVCLISDFYPGAVTVAWKADGSPVKAGVETTKPSKQSNNKYAASSYLSLTPEQWKSHRSYSCQVTHEGSTVEKTVAPTECS

SEQ ID NO: 537 - protein, 217 aa, Artificial Sequence
  Synthetic polypeptide representing artificial human antibody VL chain
QSALTQPPSASGSPGQSVTISCTGTSSDVGGYNYVSWYQQHPGKAPKLMIYEVSKRPSGVPDRFSGSKSGNTASLTVSGLQAEDEADYYCSSYAGSNNFYVFGTGTKVTVLGQPKANPTVTLFPPSSEELQANKATLVCLISDFYPGAVTVAWKADGSPVKAGVETTKPSKQSNNKYAASSYLSLTPEQWKSHRSYSCQVTHEGSTVEKTVAPTECS

SEQ ID NO: 538 - protein, 218 aa, Artificial Sequence
  Synthetic polypeptide representing artificial human antibody VL chain
QSVLTQPPSVSGAPGQRVTISCTGSNSNIGAGYDVHWYQQLPGAAPKLLIYGNGNRPSGVPDRFSGSKSDTSASLAITGLQADDEADYYCQSYDSSLSGSMIFGGGTKLTVLGQPKAAPSVTLFPPSSEELQANKATLVCLISDFYPGAVTVAWKADSSPVKAGVETTTPSKQSNNKYAASSYLSLTPEQWKSHRSYSCQVTHEGSTVEKTVAPTECS

SEQ ID NO: 539 - protein, 220 aa, Artificial Sequence
  Synthetic polypeptide representing artificial human antibody VL chain
LPVLTQPPSSSASPGESARLTCTLPSDINVTNYNIYWYQQKPGSPPRYLLYQYSDSDKGQVSGVPSRFSGSKDASANTGILLISGLQSEDEADYYCMIWSSLVVFGGGTKLTVLGQPKAAPSVTLFPPSSEELQANKATLVCLISDFYPGAVTVAWKADSSPVKAGVETTTPSKQSNNKYAASSYLSLTPEQWKSHRSYSCQVTHEGSTVEKTVAPTECS

SEQ ID NO: 540 - protein, 219 aa, Artificial Sequence
  Synthetic polypeptide representing artificial human antibody VL chain
DIVMTQSPLSLPVTPGEPASISCRSSQSLLHSDGYNYLDWFLQKPGQSPQLLIYLGSYRASGVPDRFSGSGSGTDFTLKITRVEAEDVGVYYCMQALQTPWTFGQGTKVEIKRTVAAPSVFIFPPSDEQLKSGTASVVCLLNNFYPREAKVQWKVDNALQSGNSQESVTEQDSKDSTYSLSSTLTLSKADYEKHKVYACEVTHQGLSSPVTKSFNRGEC

SEQ ID NO: 541 - protein, 214 aa, Artificial Sequence
  Synthetic polypeptide representing artificial human antibody VL chain
VIQMTQSPSSLSASVGDRVTIACRASQGIRNDLGWYQQKPGRAPKLLIYAASTLQSGVPSRFSGSGSGTDFTLTIYSLQPEDFATYYCLQNYNYPWTFGQGTKVEIQGTVAAPSVFIFPPSDEQLKSGTASVVCLLNNFYPREAKVQWKVDNALQSGNSQESVTEQDSKDSTYSLSSTLTLSKADYEKHKVYACEVTHQGLSSPVTKSFNRGEC

SEQ ID NO: 542 - protein, 219 aa, Artificial Sequence
  Synthetic polypeptide representing artificial human antibody VL chain
DIVMTQTPLSLSVTPGQPASISCKSSQSLLHSDGKTYLYWYLQKPGQSPQLLIYEVSSRFSGVPDRFSGSGSGTDFTLKISRVEAEDVGVYYCMQGIHLPRTFGQGTKLEIKRTVAAPSVFIFPPSDEQLKSGTASVVCLLNNFYPREAKVQWKVDNALQSGNSQESVTEQDSKDSTYSLSSTLTLSKADYEKHKVYACEVTHQGLSSPVTKSFNRGEC

SEQ ID NO: 543 - protein, 8 aa, Artificial Sequence
  Synthetic polypeptide representing artificial human antibody CDR-H1 region
EVTFNTYG

SEQ ID NO: 544 - protein, 8 aa, Artificial Sequence
  Synthetic polypeptide representing artificial human antibody CDR-H1 region
GFTFSSYW

SEQ ID NO: 545 - protein, 8 aa, Artificial Sequence
  Synthetic polypeptide representing artificial human antibody CDR-H1 region
GFTFEDYA

SEQ ID NO: 546 - protein, 10 aa, Artificial Sequence
  Synthetic polypeptide representing artificial human antibody CDR-H1 region
GFSLSTSGVG

SEQ ID NO: 547 - protein, 8 aa, Artificial Sequence
  Synthetic polypeptide representing artificial human antibody CDR-H1 region
GYTFTTYY

SEQ ID NO: 548 - protein, 8 aa, Artificial Sequence
  Synthetic polypeptide representing artificial human antibody CDR-H1 region
GFVFDDYA

SEQ ID NO: 549 - protein, 8 aa, Artificial Sequence
  Synthetic polypeptide representing artificial human antibody CDR-H1 region
GYTFTNYG

SEQ ID NO: 550 - protein, 8 aa, Artificial Sequence
  Synthetic polypeptide representing artificial human antibody CDR-H1 region
GFTFDDYA

SEQ ID NO: 551 - protein, 8 aa, Artificial Sequence
  Synthetic polypeptide representing artificial human antibody CDR-H1 region
GFTFSYYG

SEQ ID NO: 552 - protein, 8 aa, Artificial Sequence
  Synthetic polypeptide representing artificial human antibody CDR-H1 region
GFPFGDYA

SEQ ID NO: 553 - protein, 8 aa, Artificial Sequence
  Synthetic polypeptide representing artificial human antibody CDR-H1 region
GYIDINNG

SEQ ID NO: 554 - protein, 8 aa, Artificial Sequence
  Synthetic polypeptide representing artificial human antibody CDR-H1 region
GFTFTRHG

SEQ ID NO: 555 - protein, 8 aa, Artificial Sequence
  Synthetic polypeptide representing artificial human antibody CDR-H1 region
RFTFSSYA

SEQ ID NO: 556 - protein, 10 aa, Artificial Sequence
  Synthetic polypeptide representing artificial human antibody CDR-H1 region
GDGVSSNSAS

SEQ ID NO: 557 - protein, 8 aa, Artificial Sequence
  Synthetic polypeptide representing artificial human antibody CDR-H1 region
GFAFSSNG

SEQ ID NO: 558 - protein, 8 aa, Artificial Sequence
  Synthetic polypeptide representing artificial human antibody CDR-H1 region
GITFSSYD

SEQ ID NO: 559 - protein, 8 aa, Artificial Sequence
  Synthetic polypeptide representing artificial human antibody CDR-H1 region
GYNFTNYG

SEQ ID NO: 560 - protein, 8 aa, Artificial Sequence
  Synthetic polypeptide representing artificial human antibody CDR-H1 region
GFSFRSYE

SEQ ID NO: 561 - protein, 8 aa, Artificial Sequence
  Synthetic polypeptide representing artificial human antibody CDR-H1 region
GYIFTSYA

SEQ ID NO: 562 - protein, 9 aa, Artificial Sequence
  Synthetic polypeptide representing artificial human antibody CDR-H1 region
GYLISSGYY

SEQ ID NO: 563 - protein, 10 aa, Artificial Sequence
  Synthetic polypeptide representing artificial human antibody CDR-H1 region
GFSLNTSGVG

SEQ ID NO: 564 - protein, 8 aa, Artificial Sequence
  Synthetic polypeptide representing artificial human antibody CDR-H1 region
GFTFSNYS

SEQ ID NO: 565 - protein, 8 aa, Artificial Sequence
  Synthetic polypeptide representing artificial human antibody CDR-H1 region
GFTFSSYS

SEQ ID NO: 566 - protein, 8 aa, Artificial Sequence
  Synthetic polypeptide representing artificial human antibody CDR-H1 region
GDSMSFYY

SEQ ID NO: 567 - protein, 10 aa, Artificial Sequence
  Synthetic polypeptide representing artificial human antibody CDR-H1 region
GGSISSGSYY

SEQ ID NO: 568 - protein, 8 aa, Artificial Sequence
  Synthetic polypeptide representing artificial human antibody CDR-H1 region
GFSFSSYS

SEQ ID NO: 569 - protein, 10 aa, Artificial Sequence
  Synthetic polypeptide representing artificial human antibody CDR-H1 region
GGSISRSPYF

SEQ ID NO: 570 - protein, 8 aa, Artificial Sequence
  Synthetic polypeptide representing artificial human antibody CDR-H1 region
GFTFTSYG

SEQ ID NO: 571 - protein, 8 aa, Artificial Sequence
  Synthetic polypeptide representing artificial human antibody CDR-H1 region
SGSSGSYY

SEQ ID NO: 572 - protein, 8 aa, Artificial Sequence
  Synthetic polypeptide representing artificial human antibody CDR-H1 region
GYNFRDYY

SEQ ID NO: 573 - protein, 10 aa, Artificial Sequence
  Synthetic polypeptide representing artificial human antibody CDR-H1 region
GGSINSGDYH

SEQ ID NO: 574 - protein, 10 aa, Artificial Sequence
  Synthetic polypeptide representing artificial human antibody CDR-H1 region
GGSISSSGYY

SEQ ID NO: 575 - protein, 8 aa, Artificial Sequence
  Synthetic polypeptide representing artificial human antibody CDR-H1 region
GFTFSSYG

SEQ ID NO: 576 - protein, 10 aa, Artificial Sequence
  Synthetic polypeptide representing artificial human antibody CDR-H1 region
GFSLTTSGVG

SEQ ID NO: 577 - protein, 8 aa, Artificial Sequence
  Synthetic polypeptide representing artificial human antibody CDR-H1 region
GFTFSTYE

SEQ ID NO: 578 - protein, 8 aa, Artificial Sequence
  Synthetic polypeptide representing artificial human antibody CDR-H1 region
GGTFSSYA

SEQ ID NO: 579 - protein, 10 aa, Artificial Sequence
  Synthetic polypeptide representing artificial human antibody CDR-H1 region
GGSISSDNYY

SEQ ID NO: 580 - protein, 8 aa, Artificial Sequence
  Synthetic polypeptide representing artificial human antibody CDR-H1 region
GASISSYY

SEQ ID NO: 581 - protein, 8 aa, Artificial Sequence
  Synthetic polypeptide representing artificial human antibody CDR-H1 region
GNTFTTYT

SEQ ID NO: 582 - protein, 8 aa, Artificial Sequence
  Synthetic polypeptide representing artificial human antibody CDR-H1 region
GFTFSSYA

SEQ ID NO: 583 - protein, 8 aa, Artificial Sequence
  Synthetic polypeptide representing artificial human antibody CDR-H1 region
GFTFDDYG

SEQ ID NO: 584 - protein, 8 aa, Artificial Sequence
  Synthetic polypeptide representing artificial human antibody CDR-H1 region
GFTFSSYG

SEQ ID NO: 585 - protein, 10 aa, Artificial Sequence
  Synthetic polypeptide representing artificial human antibody CDR-H1 region
GGSISSGGYY

SEQ ID NO: 586 - protein, 8 aa, Artificial Sequence
  Synthetic polypeptide representing artificial human antibody CDR-H1 region
GYTFTGYY

SEQ ID NO: 587 - protein, 8 aa, Artificial Sequence
  Synthetic polypeptide representing artificial human antibody CDR-H1 region
GFTFSSYD

SEQ ID NO: 588 - protein, 8 aa, Artificial Sequence
  Synthetic polypeptide representing artificial human antibody CDR-H1 region
GFTFRSYG

SEQ ID NO: 589 - protein, 8 aa, Artificial Sequence
  Synthetic polypeptide representing artificial human antibody CDR-H1 region
GFTFSDYY

SEQ ID NO: 590 - protein, 8 aa, Artificial Sequence
  Synthetic polypeptide representing artificial human antibody CDR-H1 region
GFTFSSYH

SEQ ID NO: 591 - protein, 8 aa, Artificial Sequence
  Synthetic polypeptide representing artificial human antibody CDR-H1 region
GFTFSSYA

SEQ ID NO: 592 - protein, 8 aa, Artificial Sequence
  Synthetic polypeptide representing artificial human antibody CDR-H1 region
GFTLEEFA

SEQ ID NO: 593 - protein, 8 aa, Artificial Sequence
  Synthetic polypeptide representing artificial human antibody CDR-H1 region
GGSISDYY

SEQ ID NO: 594 - protein, 8 aa, Artificial Sequence
  Synthetic polypeptide representing artificial human antibody CDR-H1 region
GGTFSSYA

SEQ ID NO: 595 - protein, 8 aa, Artificial Sequence
  Synthetic polypeptide representing artificial human antibody CDR-H1 region
GYTFSSYG

SEQ ID NO: 596 - protein, 8 aa, Artificial Sequence
  Synthetic polypeptide representing artificial human antibody CDR-H1 region
GFTFRSYE

SEQ ID NO: 597 - protein, 8 aa, Artificial Sequence
  Synthetic polypeptide representing artificial human antibody CDR-H1 region
GGTFSSYA

SEQ ID NO: 598 - protein, 8 aa, Artificial Sequence
  Synthetic polypeptide representing artificial human antibody CDR-H1 region
GDSFNKYF

SEQ ID NO: 599 - protein, 8 aa, Artificial Sequence
  Synthetic polypeptide representing artificial human antibody CDR-H1 region
GFTFSTYG

SEQ ID NO: 600 - protein, 8 aa, Artificial Sequence
  Synthetic polypeptide representing artificial human antibody CDR-H1 region
GFAFSSYA

SEQ ID NO: 601 - protein, 8 aa, Artificial Sequence
  Synthetic polypeptide representing artificial human antibody CDR-H1 region
GFTFSNHA

SEQ ID NO: 602 - protein, 8 aa, Artificial Sequence
  Synthetic polypeptide representing artificial human antibody CDR-H1 region
GFTFSSHG

SEQ ID NO: 603 - protein, 10 aa, Artificial Sequence
  Synthetic polypeptide representing artificial human antibody CDR-H1 region
GGSVDNVDSY

SEQ ID NO: 604 - protein, 8 aa, Artificial Sequence
  Synthetic polypeptide representing artificial human antibody CDR-H1 region
GYSFTTYW

SEQ ID NO: 605 - protein, 10 aa, Artificial Sequence
  Synthetic polypeptide representing artificial human antibody CDR-H1 region
GDSISSGSYY

SEQ ID NO: 606 - protein, 10 aa, Artificial Sequence
  Synthetic polypeptide representing artificial human antibody CDR-H1 region
GDSVSSNSAA

SEQ ID NO: 607 - protein, 8 aa, Artificial Sequence
  Synthetic polypeptide representing artificial human antibody CDR-H1 region
GYTLSELS

SEQ ID NO: 608 - protein, 8 aa, Artificial Sequence
  Synthetic polypeptide representing artificial human antibody CDR-H1 region
GFTFSSYS

SEQ ID NO: 609 - protein, 8 aa, Artificial Sequence
  Synthetic polypeptide representing artificial human antibody CDR-H1 region
GFTFSNYA

SEQ ID NO: 610 - protein, 8 aa, Artificial Sequence
  Synthetic polypeptide representing artificial human antibody CDR-H1 region
GGPFSSYT

SEQ ID NO: 611 - protein, 10 aa, Artificial Sequence
  Synthetic polypeptide representing artificial human antibody CDR-H1 region
GGSVNTGTSY

SEQ ID NO: 612 - protein, 8 aa, Artificial Sequence
  Synthetic polypeptide representing artificial human antibody CDR-H1 region
GFHFGSHG

SEQ ID NO: 613 - protein, 10 aa, Artificial Sequence
  Synthetic polypeptide representing artificial human antibody CDR-H1 region
GGSITTGSYY

SEQ ID NO: 614 - protein, 8 aa, Artificial Sequence
  Synthetic polypeptide representing artificial human antibody CDR-H1 region
GFTFDDYA

SEQ ID NO: 615 - protein, 8 aa, Artificial Sequence
  Synthetic polypeptide representing artificial human antibody CDR-H1 region
GASMNNYY

SEQ ID NO: 616 - protein, 10 aa, Artificial Sequence
  Synthetic polypeptide representing artificial human antibody CDR-H1 region
GFSLTTTDVG

SEQ ID NO: 617 - protein, 8 aa, Artificial Sequence
  Synthetic polypeptide representing artificial human antibody CDR-H1 region
GFTFSSYS

SEQ ID NO: 618 - protein, 8 aa, Artificial Sequence
  Synthetic polypeptide representing artificial human antibody CDR-H1 region
GYNFISHW

SEQ ID NO: 619 - protein, 8 aa, Artificial Sequence
  Synthetic polypeptide representing artificial human antibody CDR-H1 region
GYSFTSFW

SEQ ID NO: 620 - protein, 8 aa, Artificial Sequence
  Synthetic polypeptide representing artificial human antibody CDR-H1 region
GGSIDSYY

SEQ ID NO: 621 - protein, 8 aa, Artificial Sequence
  Synthetic polypeptide representing artificial human antibody CDR-H1 region
GGIFSYFA

SEQ ID NO: 622 - protein, 8 aa, Artificial Sequence
  Synthetic polypeptide representing artificial human antibody CDR-H1 region
EFSFQYFS

SEQ ID NO: 623 - protein, 9 aa, Artificial Sequence
  Synthetic polypeptide representing artificial human antibody CDR-H1 region
GYTLNNDVA

SEQ ID NO: 624 - protein, 8 aa, Artificial Sequence
  Synthetic polypeptide representing artificial human antibody CDR-H1 region
GFRFNYYW

SEQ ID NO: 625 - protein, 10 aa, Artificial Sequence
  Synthetic polypeptide representing artificial human antibody CDR-H1 region
GGSISGDKNF

SEQ ID NO: 626 - protein, 8 aa, Artificial Sequence
  Synthetic polypeptide representing artificial human antibody CDR-H1 region
GFTFSDYE

SEQ ID NO: 627 - protein, 8 aa, Artificial Sequence
  Synthetic polypeptide representing artificial human antibody CDR-H1 region
GFPPRSFA

SEQ ID NO: 628 - protein, 8 aa, Artificial Sequence
  Synthetic polypeptide representing artificial human antibody CDR-H1 region
GFTFSNYG

SEQ ID NO: 629 - protein, 8 aa, Artificial Sequence
  Synthetic polypeptide representing artificial human antibody CDR-H1 region
GFTFDDYT

SEQ ID NO: 630 - protein, 8 aa, Artificial Sequence
  Synthetic polypeptide representing artificial human antibody CDR-H1 region
GDTFPNYV

SEQ ID NO: 631 - protein, 8 aa, Artificial Sequence
  Synthetic polypeptide representing artificial human antibody CDR-H1 region
GFTFDDYA

SEQ ID NO: 632 - protein, 8 aa, Artificial Sequence
  Synthetic polypeptide representing artificial human antibody CDR-H1 region
GFTFSSYA

SEQ ID NO: 633 - protein, 8 aa, Artificial Sequence
  Synthetic polypeptide representing artificial human antibody CDR-H1 region
GFTFSNYD

SEQ ID NO: 634 - protein, 8 aa, Artificial Sequence
  Synthetic polypeptide representing artificial human antibody CDR-H1 region
GFTFSPYS

SEQ ID NO: 635 - protein, 10 aa, Artificial Sequence
  Synthetic polypeptide representing artificial human antibody CDR-H1 region
GGSITSGSYF

SEQ ID NO: 636 - protein, 10 aa, Artificial Sequence
  Synthetic polypeptide representing artificial human antibody CDR-H1 region
GGSVSSSSYY

SEQ ID NO: 637 - protein, 8 aa, Artificial Sequence
  Synthetic polypeptide representing artificial human antibody CDR-H1 region
GFTFSNYD

SEQ ID NO: 638 - protein, 8 aa, Artificial Sequence
  Synthetic polypeptide representing artificial human antibody CDR-H1 region
GYAFIGNW

SEQ ID NO: 639 - protein, 10 aa, Artificial Sequence
  Synthetic polypeptide representing artificial human antibody CDR-H1 region
GFTFSFSSYA

SEQ ID NO: 640 - protein, 8 aa, Artificial Sequence
  Synthetic polypeptide representing artificial human antibody CDR-H1 region
GFTFNNYE

SEQ ID NO: 641 - protein, 8 aa, Artificial Sequence
  Synthetic polypeptide representing artificial human antibody CDR-H1 region
GFTFSSNW

SEQ ID NO: 642 - protein, 10 aa, Artificial Sequence
  Synthetic polypeptide representing artificial human antibody CDR-H1 region
GGSISSGGYY

SEQ ID NO: 643 - protein, 8 aa, Artificial Sequence
  Synthetic polypeptide representing artificial human antibody CDR-H1 region
GFTFSSYG

SEQ ID NO: 644 - protein, 8 aa, Artificial Sequence
  Synthetic polypeptide representing artificial human antibody CDR-H1 region
GFTFSDYY

SEQ ID NO: 645 - protein, 10 aa, Artificial Sequence
  Synthetic polypeptide representing artificial human antibody CDR-H1 region
GGSISSGGYP

SEQ ID NO: 646 - protein, 8 aa, Artificial Sequence
  Synthetic polypeptide representing artificial human antibody CDR-H1 region
GGSISIYY

SEQ ID NO: 647 - protein, 8 aa, Artificial Sequence
  Synthetic polypeptide representing artificial human antibody CDR-H1 region
NSSISSYY

SEQ ID NO: 648 - protein, 8 aa, Artificial Sequence
  Synthetic polypeptide representing artificial human antibody CDR-H1 region
GFTFNSYW

SEQ ID NO: 649 - protein, 8 aa, Artificial Sequence
  Synthetic polypeptide representing artificial human antibody CDR-H1 region
GFTFDDYA

SEQ ID NO: 650 - protein, 8 aa, Artificial Sequence
  Synthetic polypeptide representing artificial human antibody CDR-H1 region
GYRFNAYW

SEQ ID NO: 651 - protein, 10 aa, Artificial Sequence
  Synthetic polypeptide representing artificial human antibody CDR-H1 region
GDSVSSTSGA

SEQ ID NO: 652 - protein, 10 aa, Artificial Sequence
  Synthetic polypeptide representing artificial human antibody CDR-H1 region
GDSVSSNSAA

SEQ ID NO: 653 - protein, 8 aa, Artificial Sequence
  Synthetic polypeptide representing artificial human antibody CDR-H1 region
GGSISSYY

SEQ ID NO: 654 - protein, 8 aa, Artificial Sequence
  Synthetic polypeptide representing artificial human antibody CDR-H1 region
GYSFTSYW

SEQ ID NO: 655 - protein, 8 aa, Artificial Sequence
  Synthetic polypeptide representing artificial human antibody CDR-H1 region
GFTFSSYG

SEQ ID NO: 656 - protein, 8 aa, Artificial Sequence
  Synthetic polypeptide representing artificial human antibody CDR-H1 region
GFTFRSYS

SEQ ID NO: 657 - protein, 8 aa, Artificial Sequence
  Synthetic polypeptide representing artificial human antibody CDR-H1 region
GGTFSSYT

SEQ ID NO: 658 - protein, 8 aa, Artificial Sequence
  Synthetic polypeptide representing artificial human antibody CDR-H1 region
GFSFSRYN

SEQ ID NO: 659 - protein, 8 aa, Artificial Sequence
  Synthetic polypeptide representing artificial human antibody CDR-H1 region
GFTFTNYA

SEQ ID NO: 660 - protein, 8 aa, Artificial Sequence
  Synthetic polypeptide representing artificial human antibody CDR-H1 region
GFSFSSFG

SEQ ID NO: 661 - protein, 8 aa, Artificial Sequence
  Synthetic polypeptide representing artificial human antibody CDR-H1 region
GFTFSSYA

SEQ ID NO: 662 - protein, 8 aa, Artificial Sequence
  Synthetic polypeptide representing artificial human antibody CDR-H1 region
GFTFSSHG

SEQ ID NO: 663 - protein, 8 aa, Artificial Sequence
  Synthetic polypeptide representing artificial human antibody CDR-H1 region
GFSFSTYW

SEQ ID NO: 664 - protein, 8 aa, Artificial Sequence
  Synthetic polypeptide representing artificial human antibody CDR-H1 region
GFTFNNYW

SEQ ID NO: 665 - protein, 8 aa, Artificial Sequence
  Synthetic polypeptide representing artificial human antibody CDR-H1 region
GFTFSHGW

SEQ ID NO: 666 - protein, 8 aa, Artificial Sequence
  Synthetic polypeptide representing artificial human antibody CDR-H1 region
GGSIRNDY

SEQ ID NO: 667 - protein, 8 aa, Artificial Sequence
  Synthetic polypeptide representing artificial human antibody CDR-H1 region
GGTFSSYA

SEQ ID NO: 668 - protein, 10 aa, Artificial Sequence
  Synthetic polypeptide representing artificial human antibody CDR-H1 region
GGSISSSNYF

SEQ ID NO: 669 - protein, 8 aa, Artificial Sequence
  Synthetic polypeptide representing artificial human antibody CDR-H1 region
GFTFSDYW

SEQ ID NO: 670 - protein, 10 aa, Artificial Sequence
  Synthetic polypeptide representing artificial human antibody CDR-H1 region
DVSIISSFYY

SEQ ID NO: 671 - protein, 10 aa, Artificial Sequence
  Synthetic polypeptide representing artificial human antibody CDR-H1 region
GASVSSGSYY

SEQ ID NO: 672 - protein, 8 aa, Artificial Sequence
  Synthetic polypeptide representing artificial human antibody CDR-H1 region
GGTFSGYG

SEQ ID NO: 673 - protein, 8 aa, Artificial Sequence
  Synthetic polypeptide representing artificial human antibody CDR-H1 region
GFTFSSYW

SEQ ID NO: 674 - protein, 10 aa, Artificial Sequence
  Synthetic polypeptide representing artificial human antibody CDR-H1 region
GGSISSGDYY

SEQ ID NO: 675 - protein, 8 aa, Artificial Sequence
  Synthetic polypeptide representing artificial human antibody CDR-H1 region
GFTFSSYA

SEQ ID NO: 676 - protein, 8 aa, Artificial Sequence
  Synthetic polypeptide representing artificial human antibody CDR-H1 region
GFTFSSYA

SEQ ID NO: 677 - protein, 8 aa, Artificial Sequence
  Synthetic polypeptide representing artificial human antibody CDR-H1 region
GFTLSSYA

SEQ ID NO: 678 - protein, 10 aa, Artificial Sequence
  Synthetic polypeptide representing artificial human antibody CDR-H1 region
GGSISSGGYS

SEQ ID NO: 679 - protein, 8 aa, Artificial Sequence
  Synthetic polypeptide representing artificial human antibody CDR-H1 region
GFTFSNSA

SEQ ID NO: 680 - protein, 8 aa, Artificial Sequence
  Synthetic polypeptide representing artificial human antibody CDR-H1 region
GYTFTSHY

SEQ ID NO: 681 - protein, 8 aa, Artificial Sequence
  Synthetic polypeptide representing artificial human antibody CDR-H1 region
GFTFSAYW

SEQ ID NO: 682 - protein, 8 aa, Artificial Sequence
  Synthetic polypeptide representing artificial human antibody CDR-H1 region
GYSLTEIS

SEQ ID NO: 683 - protein, 10 aa, Artificial Sequence
  Synthetic polypeptide representing artificial human antibody CDR-H1 region
GGSIRSSAPF

SEQ ID NO: 684 - protein, 8 aa, Artificial Sequence
  Synthetic polypeptide representing artificial human antibody CDR-H1 region
GYIFTTYV

SEQ ID NO: 685 - protein, 8 aa, Artificial Sequence
  Synthetic polypeptide representing artificial human antibody CDR-H1 region
GFTFDDYA

SEQ ID NO: 686 - protein, 8 aa, Artificial Sequence
  Synthetic polypeptide representing artificial human antibody CDR-H1 region
GFTFNNYW

SEQ ID NO: 687 - protein, 8 aa, Artificial Sequence
  Synthetic polypeptide representing artificial human antibody CDR-H1 region
GDSVSSFY

SEQ ID NO: 688 - protein, 8 aa, Artificial Sequence
  Synthetic polypeptide representing artificial human antibody CDR-H1 region
GYNFNDDR

SEQ ID NO: 689 - protein, 8 aa, Artificial Sequence
  Synthetic polypeptide representing artificial human antibody CDR-H1 region
GFTVSTNY

SEQ ID NO: 690 - protein, 8 aa, Artificial Sequence
  Synthetic polypeptide representing artificial human antibody CDR-H1 region
GFTFSDHY

SEQ ID NO: 691 - protein, 8 aa, Artificial Sequence
  Synthetic polypeptide representing artificial human antibody CDR-H1 region
GFTFRDYG

SEQ ID NO: 692 - protein, 8 aa, Artificial Sequence
  Synthetic polypeptide representing artificial human antibody CDR-H1 region
GFDIRSYT

SEQ ID NO: 693 - protein, 8 aa, Artificial Sequence
  Synthetic polypeptide representing artificial human antibody CDR-H1 region
GYTFTDYY

SEQ ID NO: 694 - protein, 8 aa, Artificial Sequence
  Synthetic polypeptide representing artificial human antibody CDR-H1 region
GFTFSNYA

SEQ ID NO: 695 - protein, 8 aa, Artificial Sequence
  Synthetic polypeptide representing artificial human antibody CDR-H1 region
GFNFNSYT

SEQ ID NO: 696 - protein, 8 aa, Artificial Sequence
  Synthetic polypeptide representing artificial human antibody CDR-H1 region
GFTFDDYA

SEQ ID NO: 697 - protein, 8 aa, Artificial Sequence
  Synthetic polypeptide representing artificial human antibody CDR-H1 region
GGTFSSYG

SEQ ID NO: 698 - protein, 8 aa, Artificial Sequence
  Synthetic polypeptide representing artificial human antibody CDR-H1 region
GLTFNRFA

SEQ ID NO: 699 - protein, 9 aa, Artificial Sequence
  Synthetic polypeptide representing artificial human antibody CDR-H1 region
GYSISTAYY

SEQ ID NO: 700 - protein, 8 aa, Artificial Sequence
  Synthetic polypeptide representing artificial human antibody CDR-H1 region
GGNVRSYS

SEQ ID NO: 701 - protein, 8 aa, Artificial Sequence
  Synthetic polypeptide representing artificial human antibody CDR-H1 region
GDSISSNY

SEQ ID NO: 702 - protein, 8 aa, Artificial Sequence
  Synthetic polypeptide representing artificial human antibody CDR-H1 region
GYRFSNFG

SEQ ID NO: 703 - protein, 8 aa, Artificial Sequence
  Synthetic polypeptide representing artificial human antibody CDR-H1 region
GYTFTNYA

SEQ ID NO: 704 - protein, 10 aa, Artificial Sequence
  Synthetic polypeptide representing artificial human antibody CDR-H1 region
GDSISSSSYF

SEQ ID NO: 705 - protein, 8 aa, Artificial Sequence
  Synthetic polypeptide representing artificial human antibody CDR-H1 region
GFTFSNYG

SEQ ID NO: 706 - protein, 8 aa, Artificial Sequence
  Synthetic polypeptide representing artificial human antibody CDR-H1 region
GGSFNTYA

SEQ ID NO: 707 - protein, 8 aa, Artificial Sequence
  Synthetic polypeptide representing artificial human antibody CDR-H1 region
GDTFTSFA

SEQ ID NO: 708 - protein, 10 aa, Artificial Sequence
  Synthetic polypeptide representing artificial human antibody CDR-H1 region
GDSISNGDYC

SEQ ID NO: 709 - protein, 8 aa, Artificial Sequence
  Synthetic polypeptide representing artificial human antibody CDR-H1 region
GFTFRSYW

SEQ ID NO: 710 - protein, 8 aa, Artificial Sequence
  Synthetic polypeptide representing artificial human antibody CDR-H1 region
GFTYDSYV

SEQ ID NO: 711 - protein, 10 aa, Artificial Sequence
  Synthetic polypeptide representing artificial human antibody CDR-H1 region
SGSVSSGSHY

SEQ ID NO: 712 - protein, 8 aa, Artificial Sequence
  Synthetic polypeptide representing artificial human antibody CDR-H1 region
GYSFTGYY

SEQ ID NO: 713 - protein, 8 aa, Artificial Sequence
  Synthetic polypeptide representing artificial human antibody CDR-H1 region
GFTFSNYG

SEQ ID NO: 714 - protein, 8 aa, Artificial Sequence
  Synthetic polypeptide representing artificial human antibody CDR-H1 region
GFTFSNYN

SEQ ID NO: 715 - protein, 10 aa, Artificial Sequence
  Synthetic polypeptide representing artificial human antibody CDR-H1 region
GGSISSSSYY

SEQ ID NO: 716 - protein, 8 aa, Artificial Sequence
  Synthetic polypeptide representing artificial human antibody CDR-H1 region
GFTFSNAW

SEQ ID NO: 717 - protein, 8 aa, Artificial Sequence
  Synthetic polypeptide representing artificial human antibody CDR-H1 region
GYTFTNYF

SEQ ID NO: 718 - protein, 8 aa, Artificial Sequence
  Synthetic polypeptide representing artificial human antibody CDR-H1 region
GGTFNNYG

SEQ ID NO: 719 - protein, 8 aa, Artificial Sequence
  Synthetic polypeptide representing artificial human antibody CDR-H1 region
GFTFSSYE

SEQ ID NO: 720 - protein, 8 aa, Artificial Sequence
  Synthetic polypeptide representing artificial human antibody CDR-H1 region
GFTFTTYA

SEQ ID NO: 721 - protein, 8 aa, Artificial Sequence
  Synthetic polypeptide representing artificial human antibody CDR-H1 region
GYTFTSYW

SEQ ID NO: 722 - protein, 8 aa, Artificial Sequence
  Synthetic polypeptide representing artificial human antibody CDR-H1 region
GLTFSIYS

SEQ ID NO: 723 - protein, 10 aa, Artificial Sequence
  Synthetic polypeptide representing artificial human antibody CDR-H1 region
GFSLSNARMG

SEQ ID NO: 724 - protein, 8 aa, Artificial Sequence
  Synthetic polypeptide representing artificial human antibody CDR-H1 region
GYTFTVYY

SEQ ID NO: 725 - protein, 8 aa, Artificial Sequence
  Synthetic polypeptide representing artificial human antibody CDR-H1 region
GYTFTSYG

SEQ ID NO: 726 - protein, 10 aa, Artificial Sequence
  Synthetic polypeptide representing artificial human antibody CDR-H1 region
GDSVSSTSAA

SEQ ID NO: 727 - protein, 9 aa, Artificial Sequence
  Synthetic polypeptide representing artificial human antibody CDR-H1 region
GGSISSSNC

SEQ ID NO: 728 - protein, 8 aa, Artificial Sequence
  Synthetic polypeptide representing artificial human antibody CDR-H1 region
GFTVSSNY

SEQ ID NO: 729 - protein, 8 aa, Artificial Sequence
  Synthetic polypeptide representing artificial human antibody CDR-H1 region
GYTFTTYY

SEQ ID NO: 730 - protein, 10 aa, Artificial Sequence
  Synthetic polypeptide representing artificial human antibody CDR-H1 region
GGSVSSGSYY

SEQ ID NO: 731 - protein, 10 aa, Artificial Sequence
  Synthetic polypeptide representing artificial human antibody CDR-H1 region
GGSISSSFFY

SEQ ID NO: 732 - protein, 8 aa, Artificial Sequence
  Synthetic polypeptide representing artificial human antibody CDR-H1 region
GFTFSSYA

SEQ ID NO: 733 - protein, 8 aa, Artificial Sequence
  Synthetic polypeptide representing artificial human antibody CDR-H1 region
GFTFSTYV

SEQ ID NO: 734 - protein, 10 aa, Artificial Sequence
  Synthetic polypeptide representing artificial human antibody CDR-H1 region
GGSISSSSYY

SEQ ID NO: 735 - protein, 8 aa, Artificial Sequence
  Synthetic polypeptide representing artificial human antibody CDR-H1 region
GYTFTGYY

SEQ ID NO: 736 - protein, 8 aa, Artificial Sequence
  Synthetic polypeptide representing artificial human antibody CDR-H1 region
GYSFTSYW

SEQ ID NO: 737 - protein, 8 aa, Artificial Sequence
  Synthetic polypeptide representing artificial human antibody CDR-H1 region
GYSFTTYW

SEQ ID NO: 738 - protein, 8 aa, Artificial Sequence
  Synthetic polypeptide representing artificial human antibody CDR-H1 region
GFTFRIYA

SEQ ID NO: 739 - protein, 8 aa, Artificial Sequence
  Synthetic polypeptide representing artificial human antibody CDR-H1 region
GYTFTSYY

SEQ ID NO: 740 - protein, 8 aa, Artificial Sequence
  Synthetic polypeptide representing artificial human antibody CDR-H1 region
GLDFRDYY

SEQ ID NO: 741 - protein, 8 aa, Artificial Sequence
  Synthetic polypeptide representing artificial human antibody CDR-H1 region
GFTFISYA

SEQ ID NO: 742 - protein, 8 aa, Artificial Sequence
  Synthetic polypeptide representing artificial human antibody CDR-H1 region
GYTFTSHA

SEQ ID NO: 743 - protein, 8 aa, Artificial Sequence
  Synthetic polypeptide representing artificial human antibody CDR-H1 region
GYTFTNYA

SEQ ID NO: 744 - protein, 8 aa, Artificial Sequence
  Synthetic polypeptide representing artificial human antibody CDR-H1 region
GFTFSNFA

SEQ ID NO: 745 - protein, 8 aa, Artificial Sequence
  Synthetic polypeptide representing artificial human antibody CDR-H1 region
GFTFSHYA

SEQ ID NO: 746 - protein, 8 aa, Artificial Sequence
  Synthetic polypeptide representing artificial human antibody CDR-H1 region
GFTFSSYS

SEQ ID NO: 747 - protein, 10 aa, Artificial Sequence
  Synthetic polypeptide representing artificial human antibody CDR-H1 region
GFSLSTNGVG

SEQ ID NO: 748 - protein, 10 aa, Artificial Sequence
  Synthetic polypeptide representing artificial human antibody CDR-H1 region
GLSLSTSGVA

SEQ ID NO: 749 - protein, 10 aa, Artificial Sequence
  Synthetic polypeptide representing artificial human antibody CDR-H1 region
GGSISSGGYC

SEQ ID NO: 750 - protein, 8 aa, Artificial Sequence
  Synthetic polypeptide representing artificial human antibody CDR-H1 region
GFTFSSYW

SEQ ID NO: 751 - protein, 8 aa, Artificial Sequence
  Synthetic polypeptide representing artificial human antibody CDR-H1 region
RGTFSNHA

SEQ ID NO: 752 - protein, 8 aa, Artificial Sequence
  Synthetic polypeptide representing artificial human antibody CDR-H1 region
GGTFNFYA

SEQ ID NO: 753 - protein, 8 aa, Artificial Sequence
  Synthetic polypeptide representing artificial human antibody CDR-H1 region
GYNFIDNA

SEQ ID NO: 754 - protein, 8 aa, Artificial Sequence
  Synthetic polypeptide representing artificial human antibody CDR-H1 region
GYTFTHYG

SEQ ID NO: 755 - protein, 8 aa, Artificial Sequence
  Synthetic polypeptide representing artificial human antibody CDR-H1 region
GFTFSNYA

SEQ ID NO: 756 - protein, 8 aa, Artificial Sequence
  Synthetic polypeptide representing artificial human antibody CDR-H1 region
GYTFSSYY

SEQ ID NO: 757 - protein, 8 aa, Artificial Sequence
  Synthetic polypeptide representing artificial human antibody CDR-H1 region
GYNFSRYW

SEQ ID NO: 758 - protein, 8 aa, Artificial Sequence
  Synthetic polypeptide representing artificial human antibody CDR-H1 region
GFTFNRYG

SEQ ID NO: 759 - protein, 8 aa, Artificial Sequence
  Synthetic polypeptide representing artificial human antibody CDR-H1 region
GYSFTSFW

SEQ ID NO: 760 - protein, 8 aa, Artificial Sequence
  Synthetic polypeptide representing artificial human antibody CDR-H1 region
GFTLDDYV

SEQ ID NO: 761 - protein, 10 aa, Artificial Sequence
  Synthetic polypeptide representing artificial human antibody CDR-H1 region
GDSISSSGFF

SEQ ID NO: 762 - protein, 8 aa, Artificial Sequence
  Synthetic polypeptide representing artificial human antibody CDR-H1 region
GGPFKTYP

SEQ ID NO: 763 - protein, 8 aa, Artificial Sequence
  Synthetic polypeptide representing artificial human antibody CDR-H1 region
GFTFGDNA

SEQ ID NO: 764 - protein, 8 aa, Artificial Sequence
  Synthetic polypeptide representing artificial human antibody CDR-H1 region
GYTFSNYG

SEQ ID NO: 765 - protein, 8 aa, Artificial Sequence
  Synthetic polypeptide representing artificial human antibody CDR-H1 region
GFDFTSYW

SEQ ID NO: 766 - protein, 8 aa, Artificial Sequence
  Synthetic polypeptide representing artificial human antibody CDR-H1 region
GFTFSSYS

SEQ ID NO: 767 - protein, 10 aa, Artificial Sequence
  Synthetic polypeptide representing artificial human antibody CDR-H1 region
GVSIGTSSYY

SEQ ID NO: 768 - protein, 8 aa, Artificial Sequence
  Synthetic polypeptide representing artificial human antibody CDR-H1 region
GDSFSDYY

SEQ ID NO: 769 - protein, 8 aa, Artificial Sequence
  Synthetic polypeptide representing artificial human antibody CDR-H1 region
GFTFSNYA

SEQ ID NO: 770 - protein, 8 aa, Artificial Sequence
  Synthetic polypeptide representing artificial human antibody CDR-H1 region
GYRFTSNG

SEQ ID NO: 771 - protein, 8 aa, Artificial Sequence
  Synthetic polypeptide representing artificial human antibody CDR-H1 region
GFTFDDYG

SEQ ID NO: 772 - protein, 8 aa, Artificial Sequence
  Synthetic polypeptide representing artificial human antibody CDR-H1 region
GFSFSAYG

SEQ ID NO: 773 - protein, 8 aa, Artificial Sequence
  Synthetic polypeptide representing artificial human antibody CDR-H1 region
EFTFSAYA

SEQ ID NO: 774 - protein, 8 aa, Artificial Sequence
  Synthetic polypeptide representing artificial human antibody CDR-H1 region
GFTFSNAW

SEQ ID NO: 775 - protein, 8 aa, Artificial Sequence
  Synthetic polypeptide representing artificial human antibody CDR-H1 region
GLTFSDYG

SEQ ID NO: 776 - protein, 8 aa, Artificial Sequence
  Synthetic polypeptide representing artificial human antibody CDR-H1 region
GYVFTSFG

SEQ ID NO: 777 - protein, 8 aa, Artificial Sequence
  Synthetic polypeptide representing artificial human antibody CDR-H1 region
GFTFEDFG

SEQ ID NO: 778 - protein, 8 aa, Artificial Sequence
  Synthetic polypeptide representing artificial human antibody CDR-H1 region
GFTLSTYG

SEQ ID NO: 779 - protein, 8 aa, Artificial Sequence
  Synthetic polypeptide representing artificial human antibody CDR-H1 region
GYTFSNYA

SEQ ID NO: 780 - protein, 8 aa, Artificial Sequence
  Synthetic polypeptide representing artificial human antibody CDR-H1 region
GYSFSTYW

SEQ ID NO: 781 - protein, 10 aa, Artificial Sequence
  Synthetic polypeptide representing artificial human antibody CDR-H1 region
GFSLTTYGVG

SEQ ID NO: 782 - protein, 8 aa, Artificial Sequence
  Synthetic polypeptide representing artificial human antibody CDR-H1 region
GFTFSAYG

SEQ ID NO: 783 - protein, 8 aa, Artificial Sequence
  Synthetic polypeptide representing artificial human antibody CDR-H1 region
GGTFSEYG

SEQ ID NO: 784 - protein, 10 aa, Artificial Sequence
  Synthetic polypeptide representing artificial human antibody CDR-H1 region
GASVNSGTHF

SEQ ID NO: 785 - protein, 8 aa, Artificial Sequence
  Synthetic polypeptide representing artificial human antibody CDR-H1 region
GFTFSSYA

SEQ ID NO: 786 - protein, 8 aa, Artificial Sequence
  Synthetic polypeptide representing artificial human antibody CDR-H1 region
GFTFSSYS

SEQ ID NO: 787 - protein, 10 aa, Artificial Sequence
  Synthetic polypeptide representing artificial human antibody CDR-H1 region
GDSISRSNYY

SEQ ID NO: 788 - protein, 8 aa, Artificial Sequence
  Synthetic polypeptide representing artificial human antibody CDR-H1 region
GFTFSKFW

SEQ ID NO: 789 - protein, 10 aa, Artificial Sequence
  Synthetic polypeptide representing artificial human antibody CDR-H1 region
GFSLTTTGVG

SEQ ID NO: 790 - protein, 8 aa, Artificial Sequence
  Synthetic polypeptide representing artificial human antibody CDR-H1 region
GFIFSSYG

SEQ ID NO: 791 - protein, 8 aa, Artificial Sequence
  Synthetic polypeptide representing artificial human antibody CDR-H1 region
GFTFSSYE

SEQ ID NO: 792 - protein, 8 aa, Artificial Sequence
  Synthetic polypeptide representing artificial human antibody CDR-H1 region
GFTFSSYS

SEQ ID NO: 793 - protein, 10 aa, Artificial Sequence
  Synthetic polypeptide representing artificial human antibody CDR-H1 region
GFSLSTSGMC

SEQ ID NO: 794 - protein, 8 aa, Artificial Sequence
  Synthetic polypeptide representing artificial human antibody CDR-H1 region
GFTFSSYW

SEQ ID NO: 795 - protein, 8 aa, Artificial Sequence
  Synthetic polypeptide representing artificial human antibody CDR-H1 region
GFTFASYG

SEQ ID NO: 796 - protein, 8 aa, Artificial Sequence
  Synthetic polypeptide representing artificial human antibody CDR-H1 region
GFTFSSYS

SEQ ID NO: 797 - protein, 8 aa, Artificial Sequence
  Synthetic polypeptide representing artificial human antibody CDR-H1 region
GYIFTGSF

SEQ ID NO: 798 - protein, 10 aa, Artificial Sequence
  Synthetic polypeptide representing artificial human antibody CDR-H1 region
GGSISSGTYY

SEQ ID NO: 799 - protein, 8 aa, Artificial Sequence
  Synthetic polypeptide representing artificial human antibody CDR-H1 region
GYSFTNYW

SEQ ID NO: 800 - protein, 8 aa, Artificial Sequence
  Synthetic polypeptide representing artificial human antibody CDR-H1 region
GFTFSNAW

SEQ ID NO: 801 - protein, 8 aa, Artificial Sequence
  Synthetic polypeptide representing artificial human antibody CDR-H1 region
GFPFSTYA

SEQ ID NO: 802 - protein, 8 aa, Artificial Sequence
  Synthetic polypeptide representing artificial human antibody CDR-H1 region
GFSFSGSS

SEQ ID NO: 803 - protein, 8 aa, Artificial Sequence
  Synthetic polypeptide representing artificial human antibody CDR-H1 region
GGSISSYY

SEQ ID NO: 804 - protein, 8 aa, Artificial Sequence
  Synthetic polypeptide representing artificial human antibody CDR-H1 region
GFTFGDYA

SEQ ID NO: 805 - protein, 8 aa, Artificial Sequence
  Synthetic polypeptide representing artificial human antibody CDR-H1 region
GFTLSNYG

SEQ ID NO: 806 - protein, 8 aa, Artificial Sequence
  Synthetic polypeptide representing artificial human antibody CDR-H1 region
GFSITTHS

SEQ ID NO: 807 - protein, 8 aa, Artificial Sequence
  Synthetic polypeptide representing artificial human antibody CDR-H1 region
GFTFSSYE

SEQ ID NO: 808 - protein, 8 aa, Artificial Sequence
  Synthetic polypeptide representing artificial human antibody CDR-H1 region
GFTFSSYS

SEQ ID NO: 809 - protein, 8 aa, Artificial Sequence
  Synthetic polypeptide representing artificial human antibody CDR-H1 region
GFSVSSKY

SEQ ID NO: 810 - protein, 8 aa, Artificial Sequence
  Synthetic polypeptide representing artificial human antibody CDR-H1 region
GYSFTNYW

SEQ ID NO: 811 - protein, 8 aa, Artificial Sequence
  Synthetic polypeptide representing artificial human antibody CDR-H1 region
GFTFSGSA

SEQ ID NO: 812 - protein, 8 aa, Artificial Sequence
  Synthetic polypeptide representing artificial human antibody CDR-H1 region
GFTFSDYG

SEQ ID NO: 813 - protein, 8 aa, Artificial Sequence
  Synthetic polypeptide representing artificial human antibody CDR-H1 region
GYTFNNYG

SEQ ID NO: 814 - protein, 6 aa, Artificial Sequence
  Synthetic polypeptide representing artificial human antibody CDR-L1 region
QGVSSY

SEQ ID NO: 815 - protein, 6 aa, Artificial Sequence
  Synthetic polypeptide representing artificial human antibody CDR-L1 region
QSIGSY

SEQ ID NO: 816 - protein, 6 aa, Artificial Sequence
  Synthetic polypeptide representing artificial human antibody CDR-L1 region
QGIDVW

SEQ ID NO: 817 - protein, 8 aa, Artificial Sequence
  Synthetic polypeptide representing artificial human antibody CDR-L1 region
SSNIGSNY

SEQ ID NO: 818 - protein, 6 aa, Artificial Sequence
  Synthetic polypeptide representing artificial human antibody CDR-L1 region
SLRNYY

SEQ ID NO: 819 - protein, 6 aa, Artificial Sequence
  Synthetic polypeptide representing artificial human antibody CDR-L1 region
NIGIKS

SEQ ID NO: 820 - protein, 6 aa, Artificial Sequence
  Synthetic polypeptide representing artificial human antibody CDR-L1 region
QSISSY

SEQ ID NO: 821 - protein, 7 aa, Artificial Sequence
  Synthetic polypeptide representing artificial human antibody CDR-L1 region
QSVSSSY

SEQ ID NO: 822 - protein, 8 aa, Artificial Sequence
  Synthetic polypeptide representing artificial human antibody CDR-L1 region
SGNIASYY

SEQ ID NO: 823 - protein, 7 aa, Artificial Sequence
  Synthetic polypeptide representing artificial human antibody CDR-L1 region
QSVSSSY

SEQ ID NO: 824 - protein, 8 aa, Artificial Sequence
  Synthetic polypeptide representing artificial human antibody CDR-L1 region
SSNIENND

SEQ ID NO: 825 - protein, 11 aa, Artificial Sequence
  Synthetic polypeptide representing artificial human antibody CDR-L1 region
QSLVHSDGNTY

SEQ ID NO: 826 - protein, 8 aa, Artificial Sequence
  Synthetic polypeptide representing artificial human antibody CDR-L1 region
SSNIGRNY

SEQ ID NO: 827 - protein, 8 aa, Artificial Sequence
  Synthetic polypeptide representing artificial human antibody CDR-L1 region
ISNIGSNP

SEQ ID NO: 828 - protein, 6 aa, Artificial Sequence
  Synthetic polypeptide representing artificial human antibody CDR-L1 region
QNVNFN

SEQ ID NO: 829 - protein, 7 aa, Artificial Sequence
  Synthetic polypeptide representing artificial human antibody CDR-L1 region
QSVSSSS

SEQ ID NO: 830 - protein, 6 aa, Artificial Sequence
  Synthetic polypeptide representing artificial human antibody CDR-L1 region
ALPKQY

SEQ ID NO: 831 - protein, 6 aa, Artificial Sequence
  Synthetic polypeptide representing artificial human antibody CDR-L1 region
QSVSSY

SEQ ID NO: 832 - protein, 6 aa, Artificial Sequence
  Synthetic polypeptide representing artificial human antibody CDR-L1 region
QSVGSY

SEQ ID NO: 833 - protein, 6 aa, Artificial Sequence
  Synthetic polypeptide representing artificial human antibody CDR-L1 region
QAIANS

SEQ ID NO: 834 - protein, 12 aa, Artificial Sequence
  Synthetic polypeptide representing artificial human antibody CDR-L1 region
QSVLYSSNNENY

SEQ ID NO: 835 - protein, 6 aa, Artificial Sequence
  Synthetic polypeptide representing artificial human antibody CDR-L1 region
HNINTY

SEQ ID NO: 836 - protein, 9 aa, Artificial Sequence
  Synthetic polypeptide representing artificial human antibody CDR-L1 region
SSDVGGYNY

SEQ ID NO: 837 - protein, 8 aa, Artificial Sequence
  Synthetic polypeptide representing artificial human antibody CDR-L1 region
SANIGKNY

SEQ ID NO: 838 - protein, 6 aa, Artificial Sequence
  Synthetic polypeptide representing artificial human antibody CDR-L1 region
QSISTY

SEQ ID NO: 839 - protein, 6 aa, Artificial Sequence
  Synthetic polypeptide representing artificial human antibody CDR-L1 region
QSIKNY

SEQ ID NO: 840 - protein, 9 aa, Artificial Sequence
  Synthetic polypeptide representing artificial human antibody CDR-L1 region
SSNIGAGYD

SEQ ID NO: 841 - protein, 6 aa, Artificial Sequence
  Synthetic polypeptide representing artificial human antibody CDR-L1 region
NIGSKT

SEQ ID NO: 842 - protein, 6 aa, Artificial Sequence
  Synthetic polypeptide representing artificial human antibody CDR-L1 region
QDISNW

SEQ ID NO: 843 - protein, 6 aa, Artificial Sequence
  Synthetic polypeptide representing artificial human antibody CDR-L1 region
ALPNEN

SEQ ID NO: 844 - protein, 9 aa, Artificial Sequence
  Synthetic polypeptide representing artificial human antibody CDR-L1 region
TSDIGSYDR

SEQ ID NO: 845 - protein, 8 aa, Artificial Sequence
  Synthetic polypeptide representing artificial human antibody CDR-L1 region
SSNIGNNY

SEQ ID NO: 846 - protein, 11 aa, Artificial Sequence
  Synthetic polypeptide representing artificial human antibody CDR-L1 region
QSLVYSDGNTY

SEQ ID NO: 847 - protein, 7 aa, Artificial Sequence
  Synthetic polypeptide representing artificial human antibody CDR-L1 region
QSIRSSY

SEQ ID NO: 848 - protein, 9 aa, Artificial Sequence
  Synthetic polypeptide representing artificial human antibody CDR-L1 region
TSNIGAGYD

SEQ ID NO: 849 - protein, 6 aa, Artificial Sequence
  Synthetic polypeptide representing artificial human antibody CDR-L1 region
QSISSY

SEQ ID NO: 850 - protein, 12 aa, Artificial Sequence
  Synthetic polypeptide representing artificial human antibody CDR-L1 region
QNVLYSSNNKNY

SEQ ID NO: 851 - protein, 9 aa, Artificial Sequence
  Synthetic polypeptide representing artificial human antibody CDR-L1 region
SSNIGAGYD

SEQ ID NO: 852 - protein, 8 aa, Artificial Sequence
  Synthetic polypeptide representing artificial human antibody CDR-L1 region
SGSIASSY

SEQ ID NO: 853 - protein, 6 aa, Artificial Sequence
  Synthetic polypeptide representing artificial human antibody CDR-L1 region
QSISSY

SEQ ID NO: 854 - protein, 6 aa, Artificial Sequence
  Synthetic polypeptide representing artificial human antibody CDR-L1 region
NIGSKS

SEQ ID NO: 855 - protein, 9 aa, Artificial Sequence
  Synthetic polypeptide representing artificial human antibody CDR-L1 region
SSDVGGYNY

SEQ ID NO: 856 - protein, 6 aa, Artificial Sequence
  Synthetic polypeptide representing artificial human antibody CDR-L1 region
QSISSY

SEQ ID NO: 857 - protein, 6 aa, Artificial Sequence
  Synthetic polypeptide representing artificial human antibody CDR-L1 region
QGINSA

SEQ ID NO: 858 - protein, 6 aa, Artificial Sequence
  Synthetic polypeptide representing artificial human antibody CDR-L1 region
SLRRYY

SEQ ID NO: 859 - protein, 6 aa, Artificial Sequence
  Synthetic polypeptide representing artificial human antibody CDR-L1 region
QGIRNW

SEQ ID NO: 860 - protein, 6 aa, Artificial Sequence
  Synthetic polypeptide representing artificial human antibody CDR-L1 region
QSVGTY

SEQ ID NO: 861 - protein, 7 aa, Artificial Sequence
  Synthetic polypeptide representing artificial human antibody CDR-L1 region
QSVSSNY

SEQ ID NO: 862 - protein, 7 aa, Artificial Sequence
  Synthetic polypeptide representing artificial human antibody CDR-L1 region
QSVSSRY

SEQ ID NO: 863 - protein, 6 aa, Artificial Sequence
  Synthetic polypeptide representing artificial human antibody CDR-L1 region
QSVGSS

SEQ ID NO: 864 - protein, 6 aa, Artificial Sequence
  Synthetic polypeptide representing artificial human antibody CDR-L1 region
QSISSW

SEQ ID NO: 865 - protein, 6 aa, Artificial Sequence
  Synthetic polypeptide representing artificial human antibody CDR-L1 region
NIGSKS

SEQ ID NO: 866 - protein, 6 aa, Artificial Sequence
  Synthetic polypeptide representing artificial human antibody CDR-L1 region
QSVSTY

SEQ ID NO: 867 - protein, 11 aa, Artificial Sequence
  Synthetic polypeptide representing artificial human antibody CDR-L1 region
QSLLHSNGYNY

SEQ ID NO: 868 - protein, 6 aa, Artificial Sequence
  Synthetic polypeptide representing artificial human antibody CDR-L1 region
QSISSW

SEQ ID NO: 869 - protein, 9 aa, Artificial Sequence
  Synthetic polypeptide representing artificial human antibody CDR-L1 region
SGSVSTGNY

SEQ ID NO: 870 - protein, 7 aa, Artificial Sequence
  Synthetic polypeptide representing artificial human antibody CDR-L1 region
QSVSSSY

SEQ ID NO: 871 - protein, 6 aa, Artificial Sequence
  Synthetic polypeptide representing artificial human antibody CDR-L1 region
NIGSKS

SEQ ID NO: 872 - protein, 6 aa, Artificial Sequence
  Synthetic polypeptide representing artificial human antibody CDR-L1 region
QSISRW

SEQ ID NO: 873 - protein, 6 aa, Artificial Sequence
  Synthetic polypeptide representing artificial human antibody CDR-L1 region
QDIDDD

SEQ ID NO: 874 - protein, 7 aa, Artificial Sequence
  Synthetic polypeptide representing artificial human antibody CDR-L1 region
QSIGAAY

SEQ ID NO: 875 - protein, 6 aa, Artificial Sequence
  Synthetic polypeptide representing artificial human antibody CDR-L1 region
ALPKKY

SEQ ID NO: 876 - protein, 11 aa, Artificial Sequence
  Synthetic polypeptide representing artificial human antibody CDR-L1 region
QSLLHSDGYNY

SEQ ID NO: 877 - protein, 9 aa, Artificial Sequence
  Synthetic polypeptide representing artificial human antibody CDR-L1 region
SSDVGGYNY

SEQ ID NO: 878 - protein, 6 aa, Artificial Sequence
  Synthetic polypeptide representing artificial human antibody CDR-L1 region
QSISSN

SEQ ID NO: 879 - protein, 9 aa, Artificial Sequence
  Synthetic polypeptide representing artificial human antibody CDR-L1 region
SSDVGGYNY

SEQ ID NO: 880 - protein, 11 aa, Artificial Sequence
  Synthetic polypeptide representing artificial human antibody CDR-L1 region
QRLLHSDGKTY

SEQ ID NO: 881 - protein, 7 aa, Artificial Sequence
  Synthetic polypeptide representing artificial human antibody CDR-L1 region
QSVSSSF

SEQ ID NO: 882 - protein, 6 aa, Artificial Sequence
  Synthetic polypeptide representing artificial human antibody CDR-L1 region
QDVDTY

SEQ ID NO: 883 - protein, 8 aa, Artificial Sequence
  Synthetic polypeptide representing artificial human antibody CDR-L1 region
SSNIGKYS

SEQ ID NO: 884 - protein, 6 aa, Artificial Sequence
  Synthetic polypeptide representing artificial human antibody CDR-L1 region
QSVGSS

SEQ ID NO: 885 - protein, 7 aa, Artificial Sequence
  Synthetic polypeptide representing artificial human antibody CDR-L1 region
QSVSSSY

SEQ ID NO: 886 - protein, 6 aa, Artificial Sequence
  Synthetic polypeptide representing artificial human antibody CDR-L1 region
QSISVW

SEQ ID NO: 887 - protein, 6 aa, Artificial Sequence
  Synthetic polypeptide representing artificial human antibody CDR-L1 region
SLRRYY

SEQ ID NO: 888 - protein, 6 aa, Artificial Sequence
  Synthetic polypeptide representing artificial human antibody CDR-L1 region
QSISSY

SEQ ID NO: 889 - protein, 7 aa, Artificial Sequence
  Synthetic polypeptide representing artificial human antibody CDR-L1 region
QSVSSSY

SEQ ID NO: 890 - protein, 8 aa, Artificial Sequence
  Synthetic polypeptide representing artificial human antibody CDR-L1 region
SSNIDNNY

SEQ ID NO: 891 - protein, 6 aa, Artificial Sequence
  Synthetic polypeptide representing artificial human antibody CDR-L1 region
QTISTY

SEQ ID NO: 892 - protein, 12 aa, Artificial Sequence
  Synthetic polypeptide representing artificial human antibody CDR-L1 region
QTVLHSSNNRNY

SEQ ID NO: 893 - protein, 6 aa, Artificial Sequence
  Synthetic polypeptide representing artificial human antibody CDR-L1 region
QSVDGN

SEQ ID NO: 894 - protein, 6 aa, Artificial Sequence
  Synthetic polypeptide representing artificial human antibody CDR-L1 region
QSISNY

SEQ ID NO: 895 - protein, 9 aa, Artificial Sequence
  Synthetic polypeptide representing artificial human antibody CDR-L1 region
SSNIGAGYD

SEQ ID NO: 896 - protein, 6 aa, Artificial Sequence
  Synthetic polypeptide representing artificial human antibody CDR-L1 region
QSVSTN

SEQ ID NO: 897 - protein, 6 aa, Artificial Sequence
  Synthetic polypeptide representing artificial human antibody CDR-L1 region
QSVSGY

SEQ ID NO: 898 - protein, 8 aa, Artificial Sequence
  Synthetic polypeptide representing artificial human antibody CDR-L1 region
RSNVASHA

SEQ ID NO: 899 - protein, 12 aa, Artificial Sequence
  Synthetic polypeptide representing artificial human antibody CDR-L1 region
QSLLDSDDGKTY

SEQ ID NO: 900 - protein, 6 aa, Artificial Sequence
  Synthetic polypeptide representing artificial human antibody CDR-L1 region
KLGDKY

SEQ ID NO: 901 - protein, 6 aa, Artificial Sequence
  Synthetic polypeptide representing artificial human antibody CDR-L1 region
KLGDIC

SEQ ID NO: 902 - protein, 12 aa, Artificial Sequence
  Synthetic polypeptide representing artificial human antibody CDR-L1 region
QSLFYSSNNKNY

SEQ ID NO: 903 - protein, 6 aa, Artificial Sequence
  Synthetic polypeptide representing artificial human antibody CDR-L1 region
QSVSSY

SEQ ID NO: 904 - protein, 6 aa, Artificial Sequence
  Synthetic polypeptide representing artificial human antibody CDR-L1 region
QSVSNY

SEQ ID NO: 905 - protein, 11 aa, Artificial Sequence
  Synthetic polypeptide representing artificial human antibody CDR-L1 region
QSLLQSNGNNY

SEQ ID NO: 906 - protein, 6 aa, Artificial Sequence
  Synthetic polypeptide representing artificial human antibody CDR-L1 region
QSISGW

SEQ ID NO: 907 - protein, 8 aa, Artificial Sequence
  Synthetic polypeptide representing artificial human antibody CDR-L1 region
SSNIGNNY

SEQ ID NO: 908 - protein, 6 aa, Artificial Sequence
  Synthetic polypeptide representing artificial human antibody CDR-L1 region
QSVSNY

SEQ ID NO: 909 - protein, 11 aa, Artificial Sequence
  Synthetic polypeptide representing artificial human antibody CDR-L1 region
QSLLRRDGNNY

SEQ ID NO: 910 - protein, 9 aa, Artificial Sequence
  Synthetic polypeptide representing artificial human antibody CDR-L1 region
SSDVGGFNY

SEQ ID NO: 911 - protein, 11 aa, Artificial Sequence
  Synthetic polypeptide representing artificial human antibody CDR-L1 region
QSLVYSDGNTY

SEQ ID NO: 912 - protein, 6 aa, Artificial Sequence
  Synthetic polypeptide representing artificial human antibody CDR-L1 region
QSISSY

SEQ ID NO: 913 - protein, 6 aa, Artificial Sequence
  Synthetic polypeptide representing artificial human antibody CDR-L1 region
QDISNY

SEQ ID NO: 914 - protein, 6 aa, Artificial Sequence
  Synthetic polypeptide representing artificial human antibody CDR-L1 region
NIGSKS

SEQ ID NO: 915 - protein, 6 aa, Artificial Sequence
  Synthetic polypeptide representing artificial human antibody CDR-L1 region
QVISDY

SEQ ID NO: 916 - protein, 6 aa, Artificial Sequence
  Synthetic polypeptide representing artificial human antibody CDR-L1 region
QSISTY

SEQ ID NO: 917 - protein, 6 aa, Artificial Sequence
  Synthetic polypeptide representing artificial human antibody CDR-L1 region
QRISNW

SEQ ID NO: 918 - protein, 11 aa, Artificial Sequence
  Synthetic polypeptide representing artificial human antibody CDR-L1 region
QSLLNPDGKTY

SEQ ID NO: 919 - protein, 6 aa, Artificial Sequence
  Synthetic polypeptide representing artificial human antibody CDR-L1 region
QSISGY

SEQ ID NO: 920 - protein, 9 aa, Artificial Sequence
  Synthetic polypeptide representing artificial human antibody CDR-L1 region
SSNVGADYD

SEQ ID NO: 921 - protein, 6 aa, Artificial Sequence
  Synthetic polypeptide representing artificial human antibody CDR-L1 region
QSVSSS

SEQ ID NO: 922 - protein, 7 aa, Artificial Sequence
  Synthetic polypeptide representing artificial human antibody CDR-L1 region
QSFDGKS

SEQ ID NO: 923 - protein, 12 aa, Artificial Sequence
  Synthetic polypeptide representing artificial human antibody CDR-L1 region
QSILYSSNNKDS

SEQ ID NO: 924 - protein, 7 aa, Artificial Sequence
  Synthetic polypeptide representing artificial human antibody CDR-L1 region
QSVSGSH

SEQ ID NO: 925 - protein, 9 aa, Artificial Sequence
  Synthetic polypeptide representing artificial human antibody CDR-L1 region
SSDVGGYNY

SEQ ID NO: 926 - protein, 6 aa, Artificial Sequence
  Synthetic polypeptide representing artificial human antibody CDR-L1 region
ALPKKY

SEQ ID NO: 927 - protein, 6 aa, Artificial Sequence
  Synthetic polypeptide representing artificial human antibody CDR-L1 region
QSVSSN

SEQ ID NO: 928 - protein, 7 aa, Artificial Sequence
  Synthetic polypeptide representing artificial human antibody CDR-L1 region
QSVSSSY

SEQ ID NO: 929 - protein, 9 aa, Artificial Sequence
  Synthetic polypeptide representing artificial human antibody CDR-L1 region
SSDVGLYNF

SEQ ID NO: 930 - protein, 9 aa, Artificial Sequence
  Synthetic polypeptide representing artificial human antibody CDR-L1 region
NSNIGAGYY

SEQ ID NO: 931 - protein, 7 aa, Artificial Sequence
  Synthetic polypeptide representing artificial human antibody CDR-L1 region
QSVTSSY

SEQ ID NO: 932 - protein, 8 aa, Artificial Sequence
  Synthetic polypeptide representing artificial human antibody CDR-L1 region
SSNIGDNF

SEQ ID NO: 933 - protein, 6 aa, Artificial Sequence
  Synthetic polypeptide representing artificial human antibody CDR-L1 region
QDIDDD

SEQ ID NO: 934 - protein, 6 aa, Artificial Sequence
  Synthetic polypeptide representing artificial human antibody CDR-L1 region
QSVGSW

SEQ ID NO: 935 - protein, 6 aa, Artificial Sequence
  Synthetic polypeptide representing artificial human antibody CDR-L1 region
QDISSF

SEQ ID NO: 936 - protein, 6 aa, Artificial Sequence
  Synthetic polypeptide representing artificial human antibody CDR-L1 region
SLRDYS

SEQ ID NO: 937 - protein, 6 aa, Artificial Sequence
  Synthetic polypeptide representing artificial human antibody CDR-L1 region
QSVSAY

SEQ ID NO: 938 - protein, 6 aa, Artificial Sequence
  Synthetic polypeptide representing artificial human antibody CDR-L1 region
NIGSKS

SEQ ID NO: 939 - protein, 9 aa, Artificial Sequence
  Synthetic polypeptide representing artificial human antibody CDR-L1 region
SSDVGNYNL

SEQ ID NO: 940 - protein, 6 aa, Artificial Sequence
  Synthetic polypeptide representing artificial human antibody CDR-L1 region
QSVRSH

SEQ ID NO: 941 - protein, 6 aa, Artificial Sequence
  Synthetic polypeptide representing artificial human antibody CDR-L1 region
SLRSYY

SEQ ID NO: 942 - protein, 7 aa, Artificial Sequence
  Synthetic polypeptide representing artificial human antibody CDR-L1 region
QAIVSNY

SEQ ID NO: 943 - protein, 6 aa, Artificial Sequence
  Synthetic polypeptide representing artificial human antibody CDR-L1 region
NIGKKD

SEQ ID NO: 944 - protein, 6 aa, Artificial Sequence
  Synthetic polypeptide representing artificial human antibody CDR-L1 region
NIGSKS

SEQ ID NO: 945 - protein, 6 aa, Artificial Sequence
  Synthetic polypeptide representing artificial human antibody CDR-L1 region
ALPKQS

SEQ ID NO: 946 - protein, 6 aa, Artificial Sequence
  Synthetic polypeptide representing artificial human antibody CDR-L1 region
ALPKQY

SEQ ID NO: 947 - protein, 6 aa, Artificial Sequence
  Synthetic polypeptide representing artificial human antibody CDR-L1 region
ALPKKY

SEQ ID NO: 948 - protein, 6 aa, Artificial Sequence
  Synthetic polypeptide representing artificial human antibody CDR-L1 region
QTIDTY

SEQ ID NO: 949 - protein, 6 aa, Artificial Sequence
  Synthetic polypeptide representing artificial human antibody CDR-L1 region
QGITNY

SEQ ID NO: 950 - protein, 6 aa, Artificial Sequence
  Synthetic polypeptide representing artificial human antibody CDR-L1 region
QDISTF

SEQ ID NO: 951 - protein, 9 aa, Artificial Sequence
  Synthetic polypeptide representing artificial human antibody CDR-L1 region
SSDIGGYNY

SEQ ID NO: 952 - protein, 6 aa, Artificial Sequence
  Synthetic polypeptide representing artificial human antibody CDR-L1 region
KLGDKY

SEQ ID NO: 953 - protein, 8 aa, Artificial Sequence
  Synthetic polypeptide representing artificial human antibody CDR-L1 region
TSNIGNNF

SEQ ID NO: 954 - protein, 7 aa, Artificial Sequence
  Synthetic polypeptide representing artificial human antibody CDR-L1 region
QSISSTY

SEQ ID NO: 955 - protein, 7 aa, Artificial Sequence
  Synthetic polypeptide representing artificial human antibody CDR-L1 region
QSVSSSY

SEQ ID NO: 956 - protein, 9 aa, Artificial Sequence
  Synthetic polypeptide representing artificial human antibody CDR-L1 region
SSDVGDYNY

SEQ ID NO: 957 - protein, 6 aa, Artificial Sequence
  Synthetic polypeptide representing artificial human antibody CDR-L1 region
QFISVY

SEQ ID NO: 958 - protein, 6 aa, Artificial Sequence
  Synthetic polypeptide representing artificial human antibody CDR-L1 region
QSVSSK

SEQ ID NO: 959 - protein, 6 aa, Artificial Sequence
  Synthetic polypeptide representing artificial human antibody CDR-L1 region
VLAKNY

SEQ ID NO: 960 - protein, 9 aa, Artificial Sequence
  Synthetic polypeptide representing artificial human antibody CDR-L1 region
SSDVGAYPY

SEQ ID NO: 961 - protein, 7 aa, Artificial Sequence
  Synthetic polypeptide representing artificial human antibody CDR-L1 region
QSLSSGY

SEQ ID NO: 962 - protein, 12 aa, Artificial Sequence
  Synthetic polypeptide representing artificial human antibody CDR-L1 region
QSLLYRSNDKNY

SEQ ID NO: 963 - protein, 9 aa, Artificial Sequence
  Synthetic polypeptide representing artificial human antibody CDR-L1 region
GSNIGAGYD

SEQ ID NO: 964 - protein, 9 aa, Artificial Sequence
  Synthetic polypeptide representing artificial human antibody CDR-L1 region
SSDVGGYDH

SEQ ID NO: 965 - protein, 6 aa, Artificial Sequence
  Synthetic polypeptide representing artificial human antibody CDR-L1 region
QSISSW

SEQ ID NO: 966 - protein, 6 aa, Artificial Sequence
  Synthetic polypeptide representing artificial human antibody CDR-L1 region
QSIVTN

SEQ ID NO: 967 - protein, 7 aa, Artificial Sequence
  Synthetic polypeptide representing artificial human antibody CDR-L1 region
SGHSTYA

SEQ ID NO: 968 - protein, 7 aa, Artificial Sequence
  Synthetic polypeptide representing artificial human antibody CDR-L1 region
QSVSSSY

SEQ ID NO: 969 - protein, 9 aa, Artificial Sequence
  Synthetic polypeptide representing artificial human antibody CDR-L1 region
SSNLGAGYA

SEQ ID NO: 970 - protein, 9 aa, Artificial Sequence
  Synthetic polypeptide representing artificial human antibody CDR-L1 region
STNIGTIYD

SEQ ID NO: 971 - protein, 11 aa, Artificial Sequence
  Synthetic polypeptide representing artificial human antibody CDR-L1 region
QSLLSSNGHHL

SEQ ID NO: 972 - protein, 6 aa, Artificial Sequence
  Synthetic polypeptide representing artificial human antibody CDR-L1 region
QGISSY

SEQ ID NO: 973 - protein, 8 aa, Artificial Sequence
  Synthetic polypeptide representing artificial human antibody CDR-L1 region
NSNIGSTF

SEQ ID NO: 974 - protein, 11 aa, Artificial Sequence
  Synthetic polypeptide representing artificial human antibody CDR-L1 region
QSLLHSNGVYY

SEQ ID NO: 975 - protein, 6 aa, Artificial Sequence
  Synthetic polypeptide representing artificial human antibody CDR-L1 region
SLRSYF

SEQ ID NO: 976 - protein, 6 aa, Artificial Sequence
  Synthetic polypeptide representing artificial human antibody CDR-L1 region
QSISSW

SEQ ID NO: 977 - protein, 12 aa, Artificial Sequence
  Synthetic polypeptide representing artificial human antibody CDR-L1 region
QTVLYDSNNKNY

SEQ ID NO: 978 - protein, 8 aa, Artificial Sequence
  Synthetic polypeptide representing artificial human antibody CDR-L1 region
SSNIGGKY

SEQ ID NO: 979 - protein, 6 aa, Artificial Sequence
  Synthetic polypeptide representing artificial human antibody CDR-L1 region
QSISDW

SEQ ID NO: 980 - protein, 6 aa, Artificial Sequence
  Synthetic polypeptide representing artificial human antibody CDR-L1 region
NPGIKS

SEQ ID NO: 981 - protein, 9 aa, Artificial Sequence
  Synthetic polypeptide representing artificial human antibody CDR-L1 region
TSNIGADYD

SEQ ID NO: 982 - protein, 6 aa, Artificial Sequence
  Synthetic polypeptide representing artificial human antibody CDR-L1 region
SLRSFY

SEQ ID NO: 983 - protein, 9 aa, Artificial Sequence
  Synthetic polypeptide representing artificial human antibody CDR-L1 region
SSDVDGYNY

SEQ ID NO: 984 - protein, 12 aa, Artificial Sequence
  Synthetic polypeptide representing artificial human antibody CDR-L1 region
QSVLYSSDNKNY

SEQ ID NO: 985 - protein, 9 aa, Artificial Sequence
  Synthetic polypeptide representing artificial human antibody CDR-L1 region
SSDVGGYNY

SEQ ID NO: 986 - protein, 6 aa, Artificial Sequence
  Synthetic polypeptide representing artificial human antibody CDR-L1 region
QDISNY

SEQ ID NO: 987 - protein, 6 aa, Artificial Sequence
  Synthetic polypeptide representing artificial human antibody CDR-L1 region
NIGSKS

SEQ ID NO: 988 - protein, 7 aa, Artificial Sequence
  Synthetic polypeptide representing artificial human antibody CDR-L1 region
QSVRGNY

SEQ ID NO: 989 - protein, 8 aa, Artificial Sequence
  Synthetic polypeptide representing artificial human antibody CDR-L1 region
SSNIGSNY

SEQ ID NO: 990 - protein, 6 aa, Artificial Sequence
  Synthetic polypeptide representing artificial human antibody CDR-L1 region
NIGSYN

SEQ ID NO: 991 - protein, 7 aa, Artificial Sequence
  Synthetic polypeptide representing artificial human antibody CDR-L1 region
QRVSSNY

SEQ ID NO: 992 - protein, 9 aa, Artificial Sequence
  Synthetic polypeptide representing artificial human antibody CDR-L1 region
SSDVGSYNL

SEQ ID NO: 993 - protein, 11 aa, Artificial Sequence
  Synthetic polypeptide representing artificial human antibody CDR-L1 region
QSLVYSDGNTY

SEQ ID NO: 994 - protein, 8 aa, Artificial Sequence
  Synthetic polypeptide representing artificial human antibody CDR-L1 region
SSNIGSNY

SEQ ID NO: 995 - protein, 6 aa, Artificial Sequence
  Synthetic polypeptide representing artificial human antibody CDR-L1 region
SLRSYY

SEQ ID NO: 996 - protein, 6 aa, Artificial Sequence
  Synthetic polypeptide representing artificial human antibody CDR-L1 region
QSISSY

SEQ ID NO: 997 - protein, 6 aa, Artificial Sequence
  Synthetic polypeptide representing artificial human antibody CDR-L1 region
NIGYRN

SEQ ID NO: 998 - protein, 6 aa, Artificial Sequence
  Synthetic polypeptide representing artificial human antibody CDR-L1 region
QGIRND

SEQ ID NO: 999 - protein, 6 aa, Artificial Sequence
  Synthetic polypeptide representing artificial human antibody CDR-L1 region
QSISSW

SEQ ID NO: 1000 - protein, 11 aa, Artificial Sequence
  Synthetic polypeptide representing artificial human antibody CDR-L1 region
QSLLHSNGFNY

SEQ ID NO: 1001 - protein, 6 aa, Artificial Sequence
  Synthetic polypeptide representing artificial human antibody CDR-L1 region
KLGDKY

SEQ ID NO: 1002 - protein, 6 aa, Artificial Sequence
  Synthetic polypeptide representing artificial human antibody CDR-L1 region
ALPKKY

SEQ ID NO: 1003 - protein, 6 aa, Artificial Sequence
  Synthetic polypeptide representing artificial human antibody CDR-L1 region
SLRSYY

SEQ ID NO: 1004 - protein, 12 aa, Artificial Sequence
  Synthetic polypeptide representing artificial human antibody CDR-L1 region
QSVLYSSSSKNY

SEQ ID NO: 1005 - protein, 11 aa, Artificial Sequence
  Synthetic polypeptide representing artificial human antibody CDR-L1 region
QSLLHSNGYNY

SEQ ID NO: 1006 - protein, 9 aa, Artificial Sequence
  Synthetic polypeptide representing artificial human antibody CDR-L1 region
SSDVGGYNY

SEQ ID NO: 1007 - protein, 12 aa, Artificial Sequence
  Synthetic polypeptide representing artificial human antibody CDR-L1 region
QSVLYSSNNKNY

SEQ ID NO: 1008 - protein, 9 aa, Artificial Sequence
  Synthetic polypeptide representing artificial human antibody CDR-L1 region
SSDVGSYNL

SEQ ID NO: 1009 - protein, 6 aa, Artificial Sequence
  Synthetic polypeptide representing artificial human antibody CDR-L1 region
ALPKKY

SEQ ID NO: 1010 - protein, 6 aa, Artificial Sequence
  Synthetic polypeptide representing artificial human antibody CDR-L1 region
QSVSSN

SEQ ID NO: 1011 - protein, 7 aa, Artificial Sequence
  Synthetic polypeptide representing artificial human antibody CDR-L1 region
QSVSSSY

SEQ ID NO: 1012 - protein, 6 aa, Artificial Sequence
  Synthetic polypeptide representing artificial human antibody CDR-L1 region
NIGSRS

SEQ ID NO: 1013 - protein, 9 aa, Artificial Sequence
  Synthetic polypeptide representing artificial human antibody CDR-L1 region
SSDIGTYNL

SEQ ID NO: 1014 - protein, 12 aa, Artificial Sequence
  Synthetic polypeptide representing artificial human antibody CDR-L1 region
QSVLSTSNNKNY

SEQ ID NO: 1015 - protein, 6 aa, Artificial Sequence
  Synthetic polypeptide representing artificial human antibody CDR-L1 region
NIGSKS

SEQ ID NO: 1016 - protein, 6 aa, Artificial Sequence
  Synthetic polypeptide representing artificial human antibody CDR-L1 region
QHIAGR

SEQ ID NO: 1017 - protein, 8 aa, Artificial Sequence
  Synthetic polypeptide representing artificial human antibody CDR-L1 region
SSNIGSNT

SEQ ID NO: 1018 - protein, 8 aa, Artificial Sequence
  Synthetic polypeptide representing artificial human antibody CDR-L1 region
SGSIASNY

SEQ ID NO: 1019 - protein, 9 aa, Artificial Sequence
  Synthetic polypeptide representing artificial human antibody CDR-L1 region
SSNIGAHYD

SEQ ID NO: 1020 - protein, 6 aa, Artificial Sequence
  Synthetic polypeptide representing artificial human antibody CDR-L1 region
QSISSY

SEQ ID NO: 1021 - protein, 6 aa, Artificial Sequence
  Synthetic polypeptide representing artificial human antibody CDR-L1 region
QDISNY

SEQ ID NO: 1022 - protein, 7 aa, Artificial Sequence
  Synthetic polypeptide representing artificial human antibody CDR-L1 region
QDVASTY

SEQ ID NO: 1023 - protein, 9 aa, Artificial Sequence
  Synthetic polypeptide representing artificial human antibody CDR-L1 region
TSDVGTYNL

SEQ ID NO: 1024 - protein, 7 aa, Artificial Sequence
  Synthetic polypeptide representing artificial human antibody CDR-L1 region
QSVANNY

SEQ ID NO: 1025 - protein, 7 aa, Artificial Sequence
  Synthetic polypeptide representing artificial human antibody CDR-L1 region
QSVSSNY

SEQ ID NO: 1026 - protein, 9 aa, Artificial Sequence
  Synthetic polypeptide representing artificial human antibody CDR-L1 region
SGSVSTSFY

SEQ ID NO: 1027 - protein, 9 aa, Artificial Sequence
  Synthetic polypeptide representing artificial human antibody CDR-L1 region
SSNIGAQYD

SEQ ID NO: 1028 - protein, 9 aa, Artificial Sequence
  Synthetic polypeptide representing artificial human antibody CDR-L1 region
SSNIGAGYD

SEQ ID NO: 1029 - protein, 7 aa, Artificial Sequence
  Synthetic polypeptide representing artificial human antibody CDR-L1 region
QSVSSSY

SEQ ID NO: 1030 - protein, 9 aa, Artificial Sequence
  Synthetic polypeptide representing artificial human antibody CDR-L1 region
SSDVGGYNY

SEQ ID NO: 1031 - protein, 9 aa, Artificial Sequence
  Synthetic polypeptide representing artificial human antibody CDR-L1 region
SSDIGGYDL

SEQ ID NO: 1032 - protein, 12 aa, Artificial Sequence
  Synthetic polypeptide representing artificial human antibody CDR-L1 region
QSVLYSSNNKNY

SEQ ID NO: 1033 - protein, 8 aa, Artificial Sequence
  Synthetic polypeptide representing artificial human antibody CDR-L1 region
SSNIGSNT

SEQ ID NO: 1034 - protein, 9 aa, Artificial Sequence
  Synthetic polypeptide representing artificial human antibody CDR-L1 region
TGVVTTGHY

SEQ ID NO: 1035 - protein, 9 aa, Artificial Sequence
  Synthetic polypeptide representing artificial human antibody CDR-L1 region
YSNIGAGYD

SEQ ID NO: 1036 - protein, 6 aa, Artificial Sequence
  Synthetic polypeptide representing artificial human antibody CDR-L1 region
QNINRF

SEQ ID NO: 1037 - protein, 6 aa, Artificial Sequence
  Synthetic polypeptide representing artificial human antibody CDR-L1 region
QGIRND

SEQ ID NO: 1038 - protein, 6 aa, Artificial Sequence
  Synthetic polypeptide representing artificial human antibody CDR-L1 region
SLRTDY

SEQ ID NO: 1039 - protein, 12 aa, Artificial Sequence
  Synthetic polypeptide representing artificial human antibody CDR-L1 region
QSVLSSYNNKDY

SEQ ID NO: 1040 - protein, 11 aa, Artificial Sequence
  Synthetic polypeptide representing artificial human antibody CDR-L1 region
QSLVYSDGNTY

SEQ ID NO: 1041 - protein, 6 aa, Artificial Sequence
  Synthetic polypeptide representing artificial human antibody CDR-L1 region
ALPKKY

SEQ ID NO: 1042 - protein, 6 aa, Artificial Sequence
  Synthetic polypeptide representing artificial human antibody CDR-L1 region
NIGSKS

SEQ ID NO: 1043 - protein, 6 aa, Artificial Sequence
  Synthetic polypeptide representing artificial human antibody CDR-L1 region
QSISTY

SEQ ID NO: 1044 - protein, 6 aa, Artificial Sequence
  Synthetic polypeptide representing artificial human antibody CDR-L1 region
QSVGSD

SEQ ID NO: 1045 - protein, 12 aa, Artificial Sequence
  Synthetic polypeptide representing artificial human antibody CDR-L1 region
QSVLYSSNNKNY

SEQ ID NO: 1046 - protein, 6 aa, Artificial Sequence
  Synthetic polypeptide representing artificial human antibody CDR-L1 region
ALAKEY

SEQ ID NO: 1047 - protein, 6 aa, Artificial Sequence
  Synthetic polypeptide representing artificial human antibody CDR-L1 region
QNIRDF

SEQ ID NO: 1048 - protein, 12 aa, Artificial Sequence
  Synthetic polypeptide representing artificial human antibody CDR-L1 region
QTILYSSNNKNY

SEQ ID NO: 1049 - protein, 6 aa, Artificial Sequence
  Synthetic polypeptide representing artificial human antibody CDR-L1 region
KLGNKY

SEQ ID NO: 1050 - protein, 8 aa, Artificial Sequence
  Synthetic polypeptide representing artificial human antibody CDR-L1 region
RSNIGSNF

SEQ ID NO: 1051 - protein, 8 aa, Artificial Sequence
  Synthetic polypeptide representing artificial human antibody CDR-L1 region
SSNIGNNY

SEQ ID NO: 1052 - protein, 6 aa, Artificial Sequence
  Synthetic polypeptide representing artificial human antibody CDR-L1 region
QSVSFW

SEQ ID NO: 1053 - protein, 12 aa, Artificial Sequence
  Synthetic polypeptide representing artificial human antibody CDR-L1 region
QSVFYSSNNKNY

SEQ ID NO: 1054 - protein, 12 aa, Artificial Sequence
  Synthetic polypeptide representing artificial human antibody CDR-L1 region
QSVLYSSNNKNY

SEQ ID NO: 1055 - protein, 9 aa, Artificial Sequence
  Synthetic polypeptide representing artificial human antibody CDR-L1 region
SNDIGRYKY

SEQ ID NO: 1056 - protein, 11 aa, Artificial Sequence
  Synthetic polypeptide representing artificial human antibody CDR-L1 region
QSLVYSDGNTY

SEQ ID NO: 1057 - protein, 6 aa, Artificial Sequence
  Synthetic polypeptide representing artificial human antibody CDR-L1 region
KLGDKY

SEQ ID NO: 1058 - protein, 7 aa, Artificial Sequence
  Synthetic polypeptide representing artificial human antibody CDR-L1 region
QRVNSNY

SEQ ID NO: 1059 - protein, 6 aa, Artificial Sequence
  Synthetic polypeptide representing artificial human antibody CDR-L1 region
NLGNKY

SEQ ID NO: 1060 - protein, 11 aa, Artificial Sequence
  Synthetic polypeptide representing artificial human antibody CDR-L1 region
QSLLHSNGYNY

SEQ ID NO: 1061 - protein, 8 aa, Artificial Sequence
  Synthetic polypeptide representing artificial human antibody CDR-L1 region
SSNIGNNY

SEQ ID NO: 1062 - protein, 6 aa, Artificial Sequence
  Synthetic polypeptide representing artificial human antibody CDR-L1 region
QSISSW

SEQ ID NO: 1063 - protein, 6 aa, Artificial Sequence
  Synthetic polypeptide representing artificial human antibody CDR-L1 region
QSISSW

SEQ ID NO: 1064 - protein, 9 aa, Artificial Sequence
  Synthetic polypeptide representing artificial human antibody CDR-L1 region
SSNIGAGYD

SEQ ID NO: 1065 - protein, 6 aa, Artificial Sequence
  Synthetic polypeptide representing artificial human antibody CDR-L1 region
ALPKQY

SEQ ID NO: 1066 - protein, 6 aa, Artificial Sequence
  Synthetic polypeptide representing artificial human antibody CDR-L1 region
QNIRNN

SEQ ID NO: 1067 - protein, 6 aa, Artificial Sequence
  Synthetic polypeptide representing artificial human antibody CDR-L1 region
QSVSSN

SEQ ID NO: 1068 - protein, 6 aa, Artificial Sequence
  Synthetic polypeptide representing artificial human antibody CDR-L1 region
QSISSY

SEQ ID NO: 1069 - protein, 6 aa, Artificial Sequence
  Synthetic polypeptide representing artificial human antibody CDR-L1 region
QSISTY

SEQ ID NO: 1070 - protein, 7 aa, Artificial Sequence
  Synthetic polypeptide representing artificial human antibody CDR-L1 region
QSVTSSY

SEQ ID NO: 1071 - protein, 6 aa, Artificial Sequence
  Synthetic polypeptide representing artificial human antibody CDR-L1 region
NIGSKS

SEQ ID NO: 1072 - protein, 8 aa, Artificial Sequence
  Synthetic polypeptide representing artificial human antibody CDR-L1 region
SGSIADKY

SEQ ID NO: 1073 - protein, 11 aa, Artificial Sequence
  Synthetic polypeptide representing artificial human antibody CDR-L1 region
QSLLHSNGYNY

SEQ ID NO: 1074 - protein, 6 aa, Artificial Sequence
  Synthetic polypeptide representing artificial human antibody CDR-L1 region
QSISSW

SEQ ID NO: 1075 - protein, 11 aa, Artificial Sequence
  Synthetic polypeptide representing artificial human antibody CDR-L1 region
QSLLYRDGEHY

SEQ ID NO: 1076 - protein, 6 aa, Artificial Sequence
  Synthetic polypeptide representing artificial human antibody CDR-L1 region
QSISSY

SEQ ID NO: 1077 - protein, 12 aa, Artificial Sequence
  Synthetic polypeptide representing artificial human antibody CDR-L1 region
QSLLYSSNYKNY

SEQ ID NO: 1078 - protein, 8 aa, Artificial Sequence
  Synthetic polypeptide representing artificial human antibody CDR-L1 region
SSNIGSNY

SEQ ID NO: 1079 - protein, 9 aa, Artificial Sequence
  Synthetic polypeptide representing artificial human antibody CDR-L1 region
SSDVGGYNY

SEQ ID NO: 1080 - protein, 9 aa, Artificial Sequence
  Synthetic polypeptide representing artificial human antibody CDR-L1 region
NSNIGAGYD

SEQ ID NO: 1081 - protein, 9 aa, Artificial Sequence
  Synthetic polypeptide representing artificial human antibody CDR-L1 region
SDINVTNYN

SEQ ID NO: 1082 - protein, 11 aa, Artificial Sequence
  Synthetic polypeptide representing artificial human antibody CDR-L1 region
QSLLHSDGYNY

SEQ ID NO: 1083 - protein, 6 aa, Artificial Sequence
  Synthetic polypeptide representing artificial human antibody CDR-L1 region
QGIRND

SEQ ID NO: 1084 - protein, 11 aa, Artificial Sequence
  Synthetic polypeptide representing artificial human antibody CDR-L1 region
QSLLHSDGKTY

SEQ ID NO: 1085 - protein, 8 aa, Artificial Sequence
  Synthetic polypeptide representing artificial human antibody CDR-H2 region
MSGGGGSI

SEQ ID NO: 1086 - protein, 8 aa, Artificial Sequence
  Synthetic polypeptide representing artificial human antibody CDR-H2 region
IKQDGSEK

SEQ ID NO: 1087 - protein, 8 aa, Artificial Sequence
  Synthetic polypeptide representing artificial human antibody CDR-H2 region
ISWNSGNI

SEQ ID NO: 1088 - protein, 7 aa, Artificial Sequence
  Synthetic polypeptide representing artificial human antibody CDR-H2 region
IYWDDDK

SEQ ID NO: 1089 - protein, 8 aa, Artificial Sequence
  Synthetic polypeptide representing artificial human antibody CDR-H2 region
INTSGGST

SEQ ID NO: 1090 - protein, 8 aa, Artificial Sequence
  Synthetic polypeptide representing artificial human antibody CDR-H2 region
ISWNSVSI

SEQ ID NO: 1091 - protein, 8 aa, Artificial Sequence
  Synthetic polypeptide representing artificial human antibody CDR-H2 region
ITTYNRDT

SEQ ID NO: 1092 - protein, 8 aa, Artificial Sequence
  Synthetic polypeptide representing artificial human antibody CDR-H2 region
ISGDGGGT

SEQ ID NO: 1093 - protein, 8 aa, Artificial Sequence
  Synthetic polypeptide representing artificial human antibody CDR-H2 region
IRYDGRNK

SEQ ID NO: 1094 - protein, 8 aa, Artificial Sequence
  Synthetic polypeptide representing artificial human antibody CDR-H2 region
IGWDSGGI

SEQ ID NO: 1095 - protein, 8 aa, Artificial Sequence
  Synthetic polypeptide representing artificial human antibody CDR-H2 region
ISIYSGNT

SEQ ID NO: 1096 - protein, 8 aa, Artificial Sequence
  Synthetic polypeptide representing artificial human antibody CDR-H2 region
ISSDGRKI

SEQ ID NO: 1097 - protein, 8 aa, Artificial Sequence
  Synthetic polypeptide representing artificial human antibody CDR-H2 region
ISATTGST

SEQ ID NO: 1098 - protein, 9 aa, Artificial Sequence
  Synthetic polypeptide representing artificial human antibody CDR-H2 region
TYYRSKWYN

SEQ ID NO: 1099 - protein, 8 aa, Artificial Sequence
  Synthetic polypeptide representing artificial human antibody CDR-H2 region
IHYDGRNK

SEQ ID NO: 1100 - protein, 8 aa, Artificial Sequence
  Synthetic polypeptide representing artificial human antibody CDR-H2 region
ISSSSSSI

SEQ ID NO: 1101 - protein, 8 aa, Artificial Sequence
  Synthetic polypeptide representing artificial human antibody CDR-H2 region
ISAYNGNT

SEQ ID NO: 1102 - protein, 8 aa, Artificial Sequence
  Synthetic polypeptide representing artificial human antibody CDR-H2 region
IGIGGNTI

SEQ ID NO: 1103 - protein, 8 aa, Artificial Sequence
  Synthetic polypeptide representing artificial human antibody CDR-H2 region
INAGNGNT

SEQ ID NO: 1104 - protein, 7 aa, Artificial Sequence
  Synthetic polypeptide representing artificial human antibody CDR-H2 region
VYHSGNA

SEQ ID NO: 1105 - protein, 7 aa, Artificial Sequence
  Synthetic polypeptide representing artificial human antibody CDR-H2 region
IYWDDDE

SEQ ID NO: 1106 - protein, 8 aa, Artificial Sequence
  Synthetic polypeptide representing artificial human antibody CDR-H2 region
ISWGSSYI

SEQ ID NO: 1107 - protein, 8 aa, Artificial Sequence
  Synthetic polypeptide representing artificial human antibody CDR-H2 region
ISSSSRYI

SEQ ID NO: 1108 - protein, 7 aa, Artificial Sequence
  Synthetic polypeptide representing artificial human antibody CDR-H2 region
IYYSGNR

SEQ ID NO: 1109 - protein, 7 aa, Artificial Sequence
  Synthetic polypeptide representing artificial human antibody CDR-H2 region
IYTSGNT

SEQ ID NO: 1110 - protein, 8 aa, Artificial Sequence
  Synthetic polypeptide representing artificial human antibody CDR-H2 region
ISSKSSSK

SEQ ID NO: 1111 - protein, 7 aa, Artificial Sequence
  Synthetic polypeptide representing artificial human antibody CDR-H2 region
IYYRGTT

SEQ ID NO: 1112 - protein, 8 aa, Artificial Sequence
  Synthetic polypeptide representing artificial human antibody CDR-H2 region
IWYDGSNK

SEQ ID NO: 1113 - protein, 7 aa, Artificial Sequence
  Synthetic polypeptide representing artificial human antibody CDR-H2 region
MYTSGST

SEQ ID NO: 1114 - protein, 8 aa, Artificial Sequence
  Synthetic polypeptide representing artificial human antibody CDR-H2 region
INPNSGGT

SEQ ID NO: 1115 - protein, 7 aa, Artificial Sequence
  Synthetic polypeptide representing artificial human antibody CDR-H2 region
IHHTGSA

SEQ ID NO: 1116 - protein, 7 aa, Artificial Sequence
  Synthetic polypeptide representing artificial human antibody CDR-H2 region
IYYSGDT

SEQ ID NO: 1117 - protein, 8 aa, Artificial Sequence
  Synthetic polypeptide representing artificial human antibody CDR-H2 region
ISHDGSNK

SEQ ID NO: 1118 - protein, 7 aa, Artificial Sequence
  Synthetic polypeptide representing artificial human antibody CDR-H2 region
IYWDDDK

SEQ ID NO: 1119 - protein, 8 aa, Artificial Sequence
  Synthetic polypeptide representing artificial human antibody CDR-H2 region
INTTSDPI

SEQ ID NO: 1120 - protein, 8 aa, Artificial Sequence
  Synthetic polypeptide representing artificial human antibody CDR-H2 region
IIPIFGTA

SEQ ID NO: 1121 - protein, 7 aa, Artificial Sequence
  Synthetic polypeptide representing artificial human antibody CDR-H2 region
IYFSVTT

SEQ ID NO: 1122 - protein, 7 aa, Artificial Sequence
  Synthetic polypeptide representing artificial human antibody CDR-H2 region
LSYSGNT

SEQ ID NO: 1123 - protein, 8 aa, Artificial Sequence
  Synthetic polypeptide representing artificial human antibody CDR-H2 region
INAGNGDI

SEQ ID NO: 1124 - protein, 8 aa, Artificial Sequence
  Synthetic polypeptide representing artificial human antibody CDR-H2 region
ISGSGHST

SEQ ID NO: 1125 - protein, 8 aa, Artificial Sequence
  Synthetic polypeptide representing artificial human antibody CDR-H2 region
INWNGGST

SEQ ID NO: 1126 - protein, 8 aa, Artificial Sequence
  Synthetic polypeptide representing artificial human antibody CDR-H2 region
ISYDGSNK

SEQ ID NO: 1127 - protein, 7 aa, Artificial Sequence
  Synthetic polypeptide representing artificial human antibody CDR-H2 region
IYYSGST

SEQ ID NO: 1128 - protein, 8 aa, Artificial Sequence
  Synthetic polypeptide representing artificial human antibody CDR-H2 region
INPNSGGT

SEQ ID NO: 1129 - protein, 7 aa, Artificial Sequence
  Synthetic polypeptide representing artificial human antibody CDR-H2 region
IGTAGDT

SEQ ID NO: 1130 - protein, 8 aa, Artificial Sequence
  Synthetic polypeptide representing artificial human antibody CDR-H2 region
ISYDGSNS

SEQ ID NO: 1131 - protein, 8 aa, Artificial Sequence
  Synthetic polypeptide representing artificial human antibody CDR-H2 region
MSSGGNRR

SEQ ID NO: 1132 - protein, 8 aa, Artificial Sequence
  Synthetic polypeptide representing artificial human antibody CDR-H2 region
ISSSGTYI

SEQ ID NO: 1133 - protein, 8 aa, Artificial Sequence
  Synthetic polypeptide representing artificial human antibody CDR-H2 region
ISYDGSNK

SEQ ID NO: 1134 - protein, 8 aa, Artificial Sequence
  Synthetic polypeptide representing artificial human antibody CDR-H2 region
ISWNSGSI

SEQ ID NO: 1135 - protein, 7 aa, Artificial Sequence
  Synthetic polypeptide representing artificial human antibody CDR-H2 region
IYYSGST

SEQ ID NO: 1136 - protein, 8 aa, Artificial Sequence
  Synthetic polypeptide representing artificial human antibody CDR-H2 region
IIPIFGTA

SEQ ID NO: 1137 - protein, 8 aa, Artificial Sequence
  Synthetic polypeptide representing artificial human antibody CDR-H2 region
INGYNGNT

SEQ ID NO: 1138 - protein, 8 aa, Artificial Sequence
  Synthetic polypeptide representing artificial human antibody CDR-H2 region
ITSSGDTI

SEQ ID NO: 1139 - protein, 8 aa, Artificial Sequence
  Synthetic polypeptide representing artificial human antibody CDR-H2 region
IIPIFGTT

SEQ ID NO: 1140 - protein, 8 aa, Artificial Sequence
  Synthetic polypeptide representing artificial human antibody CDR-H2 region
IYPGDSDT

SEQ ID NO: 1141 - protein, 8 aa, Artificial Sequence
  Synthetic polypeptide representing artificial human antibody CDR-H2 region
TWYEGTNE

SEQ ID NO: 1142 - protein, 8 aa, Artificial Sequence
  Synthetic polypeptide representing artificial human antibody CDR-H2 region
MSGSGAGT

SEQ ID NO: 1143 - protein, 8 aa, Artificial Sequence
  Synthetic polypeptide representing artificial human antibody CDR-H2 region
ISYDGGTK

SEQ ID NO: 1144 - protein, 8 aa, Artificial Sequence
  Synthetic polypeptide representing artificial human antibody CDR-H2 region
IWYDGSTK

SEQ ID NO: 1145 - protein, 7 aa, Artificial Sequence
  Synthetic polypeptide representing artificial human antibody CDR-H2 region
IYFTGST

SEQ ID NO: 1146 - protein, 8 aa, Artificial Sequence
  Synthetic polypeptide representing artificial human antibody CDR-H2 region
IYPGDSDT

SEQ ID NO: 1147 - protein, 7 aa, Artificial Sequence
  Synthetic polypeptide representing artificial human antibody CDR-H2 region
IYTSGST

SEQ ID NO: 1148 - protein, 9 aa, Artificial Sequence
  Synthetic polypeptide representing artificial human antibody CDR-H2 region
THYRSKWYN

SEQ ID NO: 1149 - protein, 8 aa, Artificial Sequence
  Synthetic polypeptide representing artificial human antibody CDR-H2 region
FDPEDGET

SEQ ID NO: 1150 - protein, 8 aa, Artificial Sequence
  Synthetic polypeptide representing artificial human antibody CDR-H2 region
ISSSSSYI

SEQ ID NO: 1151 - protein, 8 aa, Artificial Sequence
  Synthetic polypeptide representing artificial human antibody CDR-H2 region
ISGSGGST

SEQ ID NO: 1152 - protein, 8 aa, Artificial Sequence
  Synthetic polypeptide representing artificial human antibody CDR-H2 region
ITPIFNIT

SEQ ID NO: 1153 - protein, 7 aa, Artificial Sequence
  Synthetic polypeptide representing artificial human antibody CDR-H2 region
IYYSGST

SEQ ID NO: 1154 - protein, 8 aa, Artificial Sequence
  Synthetic polypeptide representing artificial human antibody CDR-H2 region
ITYDGQIK

SEQ ID NO: 1155 - protein, 7 aa, Artificial Sequence
  Synthetic polypeptide representing artificial human antibody CDR-H2 region
IYYSGTT

SEQ ID NO: 1156 - protein, 8 aa, Artificial Sequence
  Synthetic polypeptide representing artificial human antibody CDR-H2 region
ISWNSGSI

SEQ ID NO: 1157 - protein, 7 aa, Artificial Sequence
  Synthetic polypeptide representing artificial human antibody CDR-H2 region
IYSSGDT

SEQ ID NO: 1158 - protein, 7 aa, Artificial Sequence
  Synthetic polypeptide representing artificial human antibody CDR-H2 region
IYWDDDE

SEQ ID NO: 1159 - protein, 8 aa, Artificial Sequence
  Synthetic polypeptide representing artificial human antibody CDR-H2 region
VSSSGSTM

SEQ ID NO: 1160 - protein, 8 aa, Artificial Sequence
  Synthetic polypeptide representing artificial human antibody CDR-H2 region
IDPSDSYT

SEQ ID NO: 1161 - protein, 8 aa, Artificial Sequence
  Synthetic polypeptide representing artificial human antibody CDR-H2 region
IFPADSDT

SEQ ID NO: 1162 - protein, 7 aa, Artificial Sequence
  Synthetic polypeptide representing artificial human antibody CDR-H2 region
IFYSGIT

SEQ ID NO: 1163 - protein, 8 aa, Artificial Sequence
  Synthetic polypeptide representing artificial human antibody CDR-H2 region
IIPIFGTS

SEQ ID NO: 1164 - protein, 8 aa, Artificial Sequence
  Synthetic polypeptide representing artificial human antibody CDR-H2 region
ITWDGSII

SEQ ID NO: 1165 - protein, 8 aa, Artificial Sequence
  Synthetic polypeptide representing artificial human antibody CDR-H2 region
INAYQGVT

SEQ ID NO: 1166 - protein, 8 aa, Artificial Sequence
  Synthetic polypeptide representing artificial human antibody CDR-H2 region
IKEDGSEK

SEQ ID NO: 1167 - protein, 7 aa, Artificial Sequence
  Synthetic polypeptide representing artificial human antibody CDR-H2 region
ISYNGNT

SEQ ID NO: 1168 - protein, 6 aa, Artificial Sequence
  Synthetic polypeptide representing artificial human antibody CDR-H2 region
IGSSGT

SEQ ID NO: 1169 - protein, 8 aa, Artificial Sequence
  Synthetic polypeptide representing artificial human antibody CDR-H2 region
ISGLGNSI

SEQ ID NO: 1170 - protein, 8 aa, Artificial Sequence
  Synthetic polypeptide representing artificial human antibody CDR-H2 region
ISDDGNDK

SEQ ID NO: 1171 - protein, 8 aa, Artificial Sequence
  Synthetic polypeptide representing artificial human antibody CDR-H2 region
ISWDGGST

SEQ ID NO: 1172 - protein, 8 aa, Artificial Sequence
  Synthetic polypeptide representing artificial human antibody CDR-H2 region
INTNNGKT

SEQ ID NO: 1173 - protein, 8 aa, Artificial Sequence
  Synthetic polypeptide representing artificial human antibody CDR-H2 region
IDWSGKTT

SEQ ID NO: 1174 - protein, 8 aa, Artificial Sequence
  Synthetic polypeptide representing artificial human antibody CDR-H2 region
ISGSGGST

SEQ ID NO: 1175 - protein, 8 aa, Artificial Sequence
  Synthetic polypeptide representing artificial human antibody CDR-H2 region
VSYDGTNK

SEQ ID NO: 1176 - protein, 8 aa, Artificial Sequence
  Synthetic polypeptide representing artificial human antibody CDR-H2 region
ITSTSSYL

SEQ ID NO: 1177 - protein, 7 aa, Artificial Sequence
  Synthetic polypeptide representing artificial human antibody CDR-H2 region
IYTSGST

SEQ ID NO: 1178 - protein, 7 aa, Artificial Sequence
  Synthetic polypeptide representing artificial human antibody CDR-H2 region
VYYSGRT

SEQ ID NO: 1179 - protein, 8 aa, Artificial Sequence
  Synthetic polypeptide representing artificial human antibody CDR-H2 region
VSYDGTNK

SEQ ID NO: 1180 - protein, 8 aa, Artificial Sequence
  Synthetic polypeptide representing artificial human antibody CDR-H2 region
IYPVDSDT

SEQ ID NO: 1181 - protein, 8 aa, Artificial Sequence
  Synthetic polypeptide representing artificial human antibody CDR-H2 region
TGGSGYTK

SEQ ID NO: 1182 - protein, 8 aa, Artificial Sequence
  Synthetic polypeptide representing artificial human antibody CDR-H2 region
ISSSGSTI

SEQ ID NO: 1183 - protein, 8 aa, Artificial Sequence
  Synthetic polypeptide representing artificial human antibody CDR-H2 region
IKEDGSEK

SEQ ID NO: 1184 - protein, 7 aa, Artificial Sequence
  Synthetic polypeptide representing artificial human antibody CDR-H2 region
IYYSGST

SEQ ID NO: 1185 - protein, 8 aa, Artificial Sequence
  Synthetic polypeptide representing artificial human antibody CDR-H2 region
ISYDGSNK

SEQ ID NO: 1186 - protein, 8 aa, Artificial Sequence
  Synthetic polypeptide representing artificial human antibody CDR-H2 region
IGSSTTAI

SEQ ID NO: 1187 - protein, 7 aa, Artificial Sequence
  Synthetic polypeptide representing artificial human antibody CDR-H2 region
ISYSGST

SEQ ID NO: 1188 - protein, 7 aa, Artificial Sequence
  Synthetic polypeptide representing artificial human antibody CDR-H2 region
IYYSGST

SEQ ID NO: 1189 - protein, 7 aa, Artificial Sequence
  Synthetic polypeptide representing artificial human antibody CDR-H2 region
ISYSGST

SEQ ID NO: 1190 - protein, 8 aa, Artificial Sequence
  Synthetic polypeptide representing artificial human antibody CDR-H2 region
IKQDGSEK

SEQ ID NO: 1191 - protein, 8 aa, Artificial Sequence
  Synthetic polypeptide representing artificial human antibody CDR-H2 region
ISWNSGSI

SEQ ID NO: 1192 - protein, 8 aa, Artificial Sequence
  Synthetic polypeptide representing artificial human antibody CDR-H2 region
IYPGDSDT

SEQ ID NO: 1193 - protein, 9 aa, Artificial Sequence
  Synthetic polypeptide representing artificial human antibody CDR-H2 region
TYYRSQWMN

SEQ ID NO: 1194 - protein, 9 aa, Artificial Sequence
  Synthetic polypeptide representing artificial human antibody CDR-H2 region
TYYRSKWYN

SEQ ID NO: 1195 - protein, 7 aa, Artificial Sequence
  Synthetic polypeptide representing artificial human antibody CDR-H2 region
LFYSGST

SEQ ID NO: 1196 - protein, 8 aa, Artificial Sequence
  Synthetic polypeptide representing artificial human antibody CDR-H2 region
IYPGDSDT

SEQ ID NO: 1197 - protein, 8 aa, Artificial Sequence
  Synthetic polypeptide representing artificial human antibody CDR-H2 region
IWYDGSNK

SEQ ID NO: 1198 - protein, 8 aa, Artificial Sequence
  Synthetic polypeptide representing artificial human antibody CDR-H2 region
ISSSSRYV

SEQ ID NO: 1199 - protein, 8 aa, Artificial Sequence
  Synthetic polypeptide representing artificial human antibody CDR-H2 region
IIPILNIT

SEQ ID NO: 1200 - protein, 8 aa, Artificial Sequence
  Synthetic polypeptide representing artificial human antibody CDR-H2 region
ISSTSNYI

SEQ ID NO: 1201 - protein, 8 aa, Artificial Sequence
  Synthetic polypeptide representing artificial human antibody CDR-H2 region
ISYDGSDE

SEQ ID NO: 1202 - protein, 8 aa, Artificial Sequence
  Synthetic polypeptide representing artificial human antibody CDR-H2 region
IWHDGSHK

SEQ ID NO: 1203 - protein, 8 aa, Artificial Sequence
  Synthetic polypeptide representing artificial human antibody CDR-H2 region
ISGDGRST

SEQ ID NO: 1204 - protein, 8 aa, Artificial Sequence
  Synthetic polypeptide representing artificial human antibody CDR-H2 region
ISDDGKNK

SEQ ID NO: 1205 - protein, 8 aa, Artificial Sequence
  Synthetic polypeptide representing artificial human antibody CDR-H2 region
IKQDGSEK

SEQ ID NO: 1206 - protein, 8 aa, Artificial Sequence
  Synthetic polypeptide representing artificial human antibody CDR-H2 region
ISSDGSTT

SEQ ID NO: 1207 - protein, 10 aa, Artificial Sequence
  Synthetic polypeptide representing artificial human antibody CDR-H2 region
IRSKTDGGTT

SEQ ID NO: 1208 - protein, 7 aa, Artificial Sequence
  Synthetic polypeptide representing artificial human antibody CDR-H2 region
ISDIGDT

SEQ ID NO: 1209 - protein, 8 aa, Artificial Sequence
  Synthetic polypeptide representing artificial human antibody CDR-H2 region
IIPIFGTA

SEQ ID NO: 1210 - protein, 7 aa, Artificial Sequence
  Synthetic polypeptide representing artificial human antibody CDR-H2 region
IYFSGKT

SEQ ID NO: 1211 - protein, 8 aa, Artificial Sequence
  Synthetic polypeptide representing artificial human antibody CDR-H2 region
INRDGSYT

SEQ ID NO: 1212 - protein, 7 aa, Artificial Sequence
  Synthetic polypeptide representing artificial human antibody CDR-H2 region
VYYSGST

SEQ ID NO: 1213 - protein, 7 aa, Artificial Sequence
  Synthetic polypeptide representing artificial human antibody CDR-H2 region
VSPSGTN

SEQ ID NO: 1214 - protein, 8 aa, Artificial Sequence
  Synthetic polypeptide representing artificial human antibody CDR-H2 region
IIPIVGEA

SEQ ID NO: 1215 - protein, 8 aa, Artificial Sequence
  Synthetic polypeptide representing artificial human antibody CDR-H2 region
INSDGSST

SEQ ID NO: 1216 - protein, 7 aa, Artificial Sequence
  Synthetic polypeptide representing artificial human antibody CDR-H2 region
IYYNGST

SEQ ID NO: 1217 - protein, 8 aa, Artificial Sequence
  Synthetic polypeptide representing artificial human antibody CDR-H2 region
ISGSGGST

SEQ ID NO: 1218 - protein, 8 aa, Artificial Sequence
  Synthetic polypeptide representing artificial human antibody CDR-H2 region
ISASGRTT

SEQ ID NO: 1219 - protein, 8 aa, Artificial Sequence
  Synthetic polypeptide representing artificial human antibody CDR-H2 region
ITANGGST

SEQ ID NO: 1220 - protein, 7 aa, Artificial Sequence
  Synthetic polypeptide representing artificial human antibody CDR-H2 region
IYHRGTS

SEQ ID NO: 1221 - protein, 8 aa, Artificial Sequence
  Synthetic polypeptide representing artificial human antibody CDR-H2 region
ISFDGSNQ

SEQ ID NO: 1222 - protein, 8 aa, Artificial Sequence
  Synthetic polypeptide representing artificial human antibody CDR-H2 region
IDPSGGSR

SEQ ID NO: 1223 - protein, 8 aa, Artificial Sequence
  Synthetic polypeptide representing artificial human antibody CDR-H2 region
INTDGSST

SEQ ID NO: 1224 - protein, 8 aa, Artificial Sequence
  Synthetic polypeptide representing artificial human antibody CDR-H2 region
FDPEGGET

SEQ ID NO: 1225 - protein, 7 aa, Artificial Sequence
  Synthetic polypeptide representing artificial human antibody CDR-H2 region
IYYNGDT

SEQ ID NO: 1226 - protein, 8 aa, Artificial Sequence
  Synthetic polypeptide representing artificial human antibody CDR-H2 region
ISAYTGNT

SEQ ID NO: 1227 - protein, 8 aa, Artificial Sequence
  Synthetic polypeptide representing artificial human antibody CDR-H2 region
IIWNSGTT

SEQ ID NO: 1228 - protein, 8 aa, Artificial Sequence
  Synthetic polypeptide representing artificial human antibody CDR-H2 region
INTDGSRG

SEQ ID NO: 1229 - protein, 7 aa, Artificial Sequence
  Synthetic polypeptide representing artificial human antibody CDR-H2 region
IYHSGST

SEQ ID NO: 1230 - protein, 10 aa, Artificial Sequence
  Synthetic polypeptide representing artificial human antibody CDR-H2 region
IKSKSDGGST

SEQ ID NO: 1231 - protein, 7 aa, Artificial Sequence
  Synthetic polypeptide representing artificial human antibody CDR-H2 region
IYSGGTT

SEQ ID NO: 1232 - protein, 10 aa, Artificial Sequence
  Synthetic polypeptide representing artificial human antibody CDR-H2 region
IKNRANSYNT

SEQ ID NO: 1233 - protein, 8 aa, Artificial Sequence
  Synthetic polypeptide representing artificial human antibody CDR-H2 region
ISFDGSDK

SEQ ID NO: 1234 - protein, 8 aa, Artificial Sequence
  Synthetic polypeptide representing artificial human antibody CDR-H2 region
ITAGGSFI

SEQ ID NO: 1235 - protein, 8 aa, Artificial Sequence
  Synthetic polypeptide representing artificial human antibody CDR-H2 region
INPNSGGT

SEQ ID NO: 1236 - protein, 8 aa, Artificial Sequence
  Synthetic polypeptide representing artificial human antibody CDR-H2 region
ISYSGGST

SEQ ID NO: 1237 - protein, 8 aa, Artificial Sequence
  Synthetic polypeptide representing artificial human antibody CDR-H2 region
ISSSGGDI

SEQ ID NO: 1238 - protein, 8 aa, Artificial Sequence
  Synthetic polypeptide representing artificial human antibody CDR-H2 region
ISWNSGDI

SEQ ID NO: 1239 - protein, 2 aa, Artificial Sequence
  Synthetic polypeptide representing artificial human antibody CDR-H2 region
MA

SEQ ID NO: 1240 - protein, 8 aa, Artificial Sequence
  Synthetic polypeptide representing artificial human antibody CDR-H2 region
IGGSGGYT

SEQ ID NO: 1241 - protein, 7 aa, Artificial Sequence
  Synthetic polypeptide representing artificial human antibody CDR-H2 region
IFHSGSA

SEQ ID NO: 1242 - protein, 8 aa, Artificial Sequence
  Synthetic polypeptide representing artificial human antibody CDR-H2 region
MITTFGKA

SEQ ID NO: 1243 - protein, 7 aa, Artificial Sequence
  Synthetic polypeptide representing artificial human antibody CDR-H2 region
IYYSGST

SEQ ID NO: 1244 - protein, 8 aa, Artificial Sequence
  Synthetic polypeptide representing artificial human antibody CDR-H2 region
ISAYNGNT

SEQ ID NO: 1245 - protein, 8 aa, Artificial Sequence
  Synthetic polypeptide representing artificial human antibody CDR-H2 region
INTVTGIP

SEQ ID NO: 1246 - protein, 7 aa, Artificial Sequence
  Synthetic polypeptide representing artificial human antibody CDR-H2 region
VYYSGST

SEQ ID NO: 1247 - protein, 8 aa, Artificial Sequence
  Synthetic polypeptide representing artificial human antibody CDR-H2 region
IAYDGSQK

SEQ ID NO: 1248 - protein, 8 aa, Artificial Sequence
  Synthetic polypeptide representing artificial human antibody CDR-H2 region
IIPVFGTT

SEQ ID NO: 1249 - protein, 8 aa, Artificial Sequence
  Synthetic polypeptide representing artificial human antibody CDR-H2 region
INAGNGDT

SEQ ID NO: 1250 - protein, 7 aa, Artificial Sequence
  Synthetic polypeptide representing artificial human antibody CDR-H2 region
IYHSGST

SEQ ID NO: 1251 - protein, 8 aa, Artificial Sequence
  Synthetic polypeptide representing artificial human antibody CDR-H2 region
VEGYRSEE

SEQ ID NO: 1252 - protein, 8 aa, Artificial Sequence
  Synthetic polypeptide representing artificial human antibody CDR-H2 region
ISASGGGT

SEQ ID NO: 1253 - protein, 7 aa, Artificial Sequence
  Synthetic polypeptide representing artificial human antibody CDR-H2 region
IYYSGTS

SEQ ID NO: 1254 - protein, 8 aa, Artificial Sequence
  Synthetic polypeptide representing artificial human antibody CDR-H2 region
INPKTGDT

SEQ ID NO: 1255 - protein, 8 aa, Artificial Sequence
  Synthetic polypeptide representing artificial human antibody CDR-H2 region
ISYDGSNK

SEQ ID NO: 1256 - protein, 8 aa, Artificial Sequence
  Synthetic polypeptide representing artificial human antibody CDR-H2 region
ISSSSSYI

SEQ ID NO: 1257 - protein, 7 aa, Artificial Sequence
  Synthetic polypeptide representing artificial human antibody CDR-H2 region
IYYSGST

SEQ ID NO: 1258 - protein, 10 aa, Artificial Sequence
  Synthetic polypeptide representing artificial human antibody CDR-H2 region
IKSKTDGGTT

SEQ ID NO: 1259 - protein, 8 aa, Artificial Sequence
  Synthetic polypeptide representing artificial human antibody CDR-H2 region
INPSFGST

SEQ ID NO: 1260 - protein, 8 aa, Artificial Sequence
  Synthetic polypeptide representing artificial human antibody CDR-H2 region
IMPMFGRT

SEQ ID NO: 1261 - protein, 8 aa, Artificial Sequence
  Synthetic polypeptide representing artificial human antibody CDR-H2 region
ISSTGTTT

SEQ ID NO: 1262 - protein, 8 aa, Artificial Sequence
  Synthetic polypeptide representing artificial human antibody CDR-H2 region
ISNDGSNK

SEQ ID NO: 1263 - protein, 8 aa, Artificial Sequence
  Synthetic polypeptide representing artificial human antibody CDR-H2 region
IYPGDSDT

SEQ ID NO: 1264 - protein, 8 aa, Artificial Sequence
  Synthetic polypeptide representing artificial human antibody CDR-H2 region
ISRGSSVI

SEQ ID NO: 1265 - protein, 7 aa, Artificial Sequence
  Synthetic polypeptide representing artificial human antibody CDR-H2 region
IFSNDEK

SEQ ID NO: 1266 - protein, 8 aa, Artificial Sequence
  Synthetic polypeptide representing artificial human antibody CDR-H2 region
INPNSGGT

SEQ ID NO: 1267 - protein, 8 aa, Artificial Sequence
  Synthetic polypeptide representing artificial human antibody CDR-H2 region
ISAYNGNT

SEQ ID NO: 1268 - protein, 9 aa, Artificial Sequence
  Synthetic polypeptide representing artificial human antibody CDR-H2 region
TFYRTKWYS

SEQ ID NO: 1269 - protein, 7 aa, Artificial Sequence
  Synthetic polypeptide representing artificial human antibody CDR-H2 region
ICHSGST

SEQ ID NO: 1270 - protein, 7 aa, Artificial Sequence
  Synthetic polypeptide representing artificial human antibody CDR-H2 region
IYSGGST

SEQ ID NO: 1271 - protein, 8 aa, Artificial Sequence
  Synthetic polypeptide representing artificial human antibody CDR-H2 region
INPNGGTT

SEQ ID NO: 1272 - protein, 7 aa, Artificial Sequence
  Synthetic polypeptide representing artificial human antibody CDR-H2 region
IYYSGST

SEQ ID NO: 1273 - protein, 7 aa, Artificial Sequence
  Synthetic polypeptide representing artificial human antibody CDR-H2 region
IHYTGST

SEQ ID NO: 1274 - protein, 8 aa, Artificial Sequence
  Synthetic polypeptide representing artificial human antibody CDR-H2 region
ISYDGSNK

SEQ ID NO: 1275 - protein, 8 aa, Artificial Sequence
  Synthetic polypeptide representing artificial human antibody CDR-H2 region
ISGSGGST

SEQ ID NO: 1276 - protein, 7 aa, Artificial Sequence
  Synthetic polypeptide representing artificial human antibody CDR-H2 region
IYYSGST

SEQ ID NO: 1277 - protein, 8 aa, Artificial Sequence
  Synthetic polypeptide representing artificial human antibody CDR-H2 region
INPNSGGT

SEQ ID NO: 1278 - protein, 8 aa, Artificial Sequence
  Synthetic polypeptide representing artificial human antibody CDR-H2 region
INPADSDT

SEQ ID NO: 1279 - protein, 8 aa, Artificial Sequence
  Synthetic polypeptide representing artificial human antibody CDR-H2 region
IYPADSDT

SEQ ID NO: 1280 - protein, 8 aa, Artificial Sequence
  Synthetic polypeptide representing artificial human antibody CDR-H2 region
ISYSGNTT

SEQ ID NO: 1281 - protein, 8 aa, Artificial Sequence
  Synthetic polypeptide representing artificial human antibody CDR-H2 region
INPGGGST

SEQ ID NO: 1282 - protein, 8 aa, Artificial Sequence
  Synthetic polypeptide representing artificial human antibody CDR-H2 region
ITSPGGHT

SEQ ID NO: 1283 - protein, 8 aa, Artificial Sequence
  Synthetic polypeptide representing artificial human antibody CDR-H2 region
ISGSGGST

SEQ ID NO: 1284 - protein, 8 aa, Artificial Sequence
  Synthetic polypeptide representing artificial human antibody CDR-H2 region
INPVNGVT

SEQ ID NO: 1285 - protein, 8 aa, Artificial Sequence
  Synthetic polypeptide representing artificial human antibody CDR-H2 region
INTNTGNP

SEQ ID NO: 1286 - protein, 8 aa, Artificial Sequence
  Synthetic polypeptide representing artificial human antibody CDR-H2 region
ISSDGSNK

SEQ ID NO: 1287 - protein, 8 aa, Artificial Sequence
  Synthetic polypeptide representing artificial human antibody CDR-H2 region
VSGSGFTT

SEQ ID NO: 1288 - protein, 8 aa, Artificial Sequence
  Synthetic polypeptide representing artificial human antibody CDR-H2 region
ISSSSSYI

SEQ ID NO: 1289 - protein, 7 aa, Artificial Sequence
  Synthetic polypeptide representing artificial human antibody CDR-H2 region
INWDDDK

SEQ ID NO: 1290 - protein, 7 aa, Artificial Sequence
  Synthetic polypeptide representing artificial human antibody CDR-H2 region
IYWDDDT

SEQ ID NO: 1291 - protein, 7 aa, Artificial Sequence
  Synthetic polypeptide representing artificial human antibody CDR-H2 region
IYYIGTT

SEQ ID NO: 1292 - protein, 8 aa, Artificial Sequence
  Synthetic polypeptide representing artificial human antibody CDR-H2 region
INQDGGEK

SEQ ID NO: 1293 - protein, 8 aa, Artificial Sequence
  Synthetic polypeptide representing artificial human antibody CDR-H2 region
IIPVFGPP

SEQ ID NO: 1294 - protein, 8 aa, Artificial Sequence
  Synthetic polypeptide representing artificial human antibody CDR-H2 region
IVPIFDTT

SEQ ID NO: 1295 - protein, 8 aa, Artificial Sequence
  Synthetic polypeptide representing artificial human antibody CDR-H2 region
INAGNGNT

SEQ ID NO: 1296 - protein, 8 aa, Artificial Sequence
  Synthetic polypeptide representing artificial human antibody CDR-H2 region
ISPYNGNI

SEQ ID NO: 1297 - protein, 8 aa, Artificial Sequence
  Synthetic polypeptide representing artificial human antibody CDR-H2 region
ISGPGESS

SEQ ID NO: 1298 - protein, 8 aa, Artificial Sequence
  Synthetic polypeptide representing artificial human antibody CDR-H2 region
INPSGGYT

SEQ ID NO: 1299 - protein, 8 aa, Artificial Sequence
  Synthetic polypeptide representing artificial human antibody CDR-H2 region
VFPGDSDI

SEQ ID NO: 1300 - protein, 8 aa, Artificial Sequence
  Synthetic polypeptide representing artificial human antibody CDR-H2 region
IWYDGTNK

SEQ ID NO: 1301 - protein, 8 aa, Artificial Sequence
  Synthetic polypeptide representing artificial human antibody CDR-H2 region
IDPSDSYT

SEQ ID NO: 1302 - protein, 8 aa, Artificial Sequence
  Synthetic polypeptide representing artificial human antibody CDR-H2 region
ISGDGTRT

SEQ ID NO: 1303 - protein, 8 aa, Artificial Sequence
  Synthetic polypeptide representing artificial human antibody CDR-H2 region
TYHRTTTT

SEQ ID NO: 1304 - protein, 8 aa, Artificial Sequence
  Synthetic polypeptide representing artificial human antibody CDR-H2 region
ITPNSGTP

SEQ ID NO: 1305 - protein, 10 aa, Artificial Sequence
  Synthetic polypeptide representing artificial human antibody CDR-H2 region
IRSKAYGGTR

SEQ ID NO: 1306 - protein, 8 aa, Artificial Sequence
  Synthetic polypeptide representing artificial human antibody CDR-H2 region
ISGYNGRT

SEQ ID NO: 1307 - protein, 8 aa, Artificial Sequence
  Synthetic polypeptide representing artificial human antibody CDR-H2 region
MNADGSEK

SEQ ID NO: 1308 - protein, 8 aa, Artificial Sequence
  Synthetic polypeptide representing artificial human antibody CDR-H2 region
ISSSSSTI

SEQ ID NO: 1309 - protein, 7 aa, Artificial Sequence
  Synthetic polypeptide representing artificial human antibody CDR-H2 region
IYYSGST

SEQ ID NO: 1310 - protein, 7 aa, Artificial Sequence
  Synthetic polypeptide representing artificial human antibody CDR-H2 region
MFYGGST

SEQ ID NO: 1311 - protein, 8 aa, Artificial Sequence
  Synthetic polypeptide representing artificial human antibody CDR-H2 region
IWYDGSNE

SEQ ID NO: 1312 - protein, 8 aa, Artificial Sequence
  Synthetic polypeptide representing artificial human antibody CDR-H2 region
ISTDSGNT

SEQ ID NO: 1313 - protein, 8 aa, Artificial Sequence
  Synthetic polypeptide representing artificial human antibody CDR-H2 region
IHWNGGST

SEQ ID NO: 1314 - protein, 8 aa, Artificial Sequence
  Synthetic polypeptide representing artificial human antibody CDR-H2 region
MWYDGNNK

SEQ ID NO: 1315 - protein, 8 aa, Artificial Sequence
  Synthetic polypeptide representing artificial human antibody CDR-H2 region
ISGSGGRT

SEQ ID NO: 1316 - protein, 10 aa, Artificial Sequence
  Synthetic polypeptide representing artificial human antibody CDR-H2 region
IKTKTDGGTT

SEQ ID NO: 1317 - protein, 8 aa, Artificial Sequence
  Synthetic polypeptide representing artificial human antibody CDR-H2 region
IWHDGSKT

SEQ ID NO: 1318 - protein, 8 aa, Artificial Sequence
  Synthetic polypeptide representing artificial human antibody CDR-H2 region
ISPYTRQT

SEQ ID NO: 1319 - protein, 8 aa, Artificial Sequence
  Synthetic polypeptide representing artificial human antibody CDR-H2 region
TRFDGSEK

SEQ ID NO: 1320 - protein, 8 aa, Artificial Sequence
  Synthetic polypeptide representing artificial human antibody CDR-H2 region
ISHDGSNN

SEQ ID NO: 1321 - protein, 8 aa, Artificial Sequence
  Synthetic polypeptide representing artificial human antibody CDR-H2 region
IHVGNDHT

SEQ ID NO: 1322 - protein, 8 aa, Artificial Sequence
  Synthetic polypeptide representing artificial human antibody CDR-H2 region
FDPSDSYN

SEQ ID NO: 1323 - protein, 7 aa, Artificial Sequence
  Synthetic polypeptide representing artificial human antibody CDR-H2 region
IYWDDDK

SEQ ID NO: 1324 - protein, 8 aa, Artificial Sequence
  Synthetic polypeptide representing artificial human antibody CDR-H2 region
ISGDSRDI

SEQ ID NO: 1325 - protein, 8 aa, Artificial Sequence
  Synthetic polypeptide representing artificial human antibody CDR-H2 region
IIPVLGIP

SEQ ID NO: 1326 - protein, 7 aa, Artificial Sequence
  Synthetic polypeptide representing artificial human antibody CDR-H2 region
VYYSGNT

SEQ ID NO: 1327 - protein, 8 aa, Artificial Sequence
  Synthetic polypeptide representing artificial human antibody CDR-H2 region
ISSNGGST

SEQ ID NO: 1328 - protein, 8 aa, Artificial Sequence
  Synthetic polypeptide representing artificial human antibody CDR-H2 region
ISSSRSTI

SEQ ID NO: 1329 - protein, 7 aa, Artificial Sequence
  Synthetic polypeptide representing artificial human antibody CDR-H2 region
IIHTGTT

SEQ ID NO: 1330 - protein, 8 aa, Artificial Sequence
  Synthetic polypeptide representing artificial human antibody CDR-H2 region
INTDGTVT

SEQ ID NO: 1331 - protein, 7 aa, Artificial Sequence
  Synthetic polypeptide representing artificial human antibody CDR-H2 region
IYWDDDK

SEQ ID NO: 1332 - protein, 8 aa, Artificial Sequence
  Synthetic polypeptide representing artificial human antibody CDR-H2 region
ISYDGSNK

SEQ ID NO: 1333 - protein, 8 aa, Artificial Sequence
  Synthetic polypeptide representing artificial human antibody CDR-H2 region
ISSSGSTI

SEQ ID NO: 1334 - protein, 8 aa, Artificial Sequence
  Synthetic polypeptide representing artificial human antibody CDR-H2 region
ISSSSSTI

SEQ ID NO: 1335 - protein, 7 aa, Artificial Sequence
  Synthetic polypeptide representing artificial human antibody CDR-H2 region
IDWDDDK

SEQ ID NO: 1336 - protein, 8 aa, Artificial Sequence
  Synthetic polypeptide representing artificial human antibody CDR-H2 region
IKQDGSEK

SEQ ID NO: 1337 - protein, 8 aa, Artificial Sequence
  Synthetic polypeptide representing artificial human antibody CDR-H2 region
FVGSGDTT

SEQ ID NO: 1338 - protein, 8 aa, Artificial Sequence
  Synthetic polypeptide representing artificial human antibody CDR-H2 region
ISSSSSTK

SEQ ID NO: 1339 - protein, 8 aa, Artificial Sequence
  Synthetic polypeptide representing artificial human antibody CDR-H2 region
INPKTGAT

SEQ ID NO: 1340 - protein, 7 aa, Artificial Sequence
  Synthetic polypeptide representing artificial human antibody CDR-H2 region
IYASGST

SEQ ID NO: 1341 - protein, 8 aa, Artificial Sequence
  Synthetic polypeptide representing artificial human antibody CDR-H2 region
IYPGDSDT

SEQ ID NO: 1342 - protein, 10 aa, Artificial Sequence
  Synthetic polypeptide representing artificial human antibody CDR-H2 region
IKSKTDGGTT

SEQ ID NO: 1343 - protein, 8 aa, Artificial Sequence
  Synthetic polypeptide representing artificial human antibody CDR-H2 region
ISKDGNSK

SEQ ID NO: 1344 - protein, 10 aa, Artificial Sequence
  Synthetic polypeptide representing artificial human antibody CDR-H2 region
IRSKTKNYAT

SEQ ID NO: 1345 - protein, 7 aa, Artificial Sequence
  Synthetic polypeptide representing artificial human antibody CDR-H2 region
IYTSGST

SEQ ID NO: 1346 - protein, 10 aa, Artificial Sequence
  Synthetic polypeptide representing artificial human antibody CDR-H2 region
ISTKGYDETA

SEQ ID NO: 1347 - protein, 8 aa, Artificial Sequence
  Synthetic polypeptide representing artificial human antibody CDR-H2 region
IPYDGSNK

SEQ ID NO: 1348 - protein, 8 aa, Artificial Sequence
  Synthetic polypeptide representing artificial human antibody CDR-H2 region
ISTSTSTI

SEQ ID NO: 1349 - protein, 8 aa, Artificial Sequence
  Synthetic polypeptide representing artificial human antibody CDR-H2 region
ISSSGSTI

SEQ ID NO: 1350 - protein, 8 aa, Artificial Sequence
  Synthetic polypeptide representing artificial human antibody CDR-H2 region
ISSSSSTI

SEQ ID NO: 1351 - protein, 7 aa, Artificial Sequence
  Synthetic polypeptide representing artificial human antibody CDR-H2 region
MYSGGAT

SEQ ID NO: 1352 - protein, 8 aa, Artificial Sequence
  Synthetic polypeptide representing artificial human antibody CDR-H2 region
IYPGDSDT

SEQ ID NO: 1353 - protein, 10 aa, Artificial Sequence
  Synthetic polypeptide representing artificial human antibody CDR-H2 region
IRSKPNSYAT

SEQ ID NO: 1354 - protein, 8 aa, Artificial Sequence
  Synthetic polypeptide representing artificial human antibody CDR-H2 region
IWYDGSNE

SEQ ID NO: 1355 - protein, 8 aa, Artificial Sequence
  Synthetic polypeptide representing artificial human antibody CDR-H2 region
IWYDGSNK

SEQ ID NO: 1356 - protein, 3 aa, Artificial Sequence
  Synthetic polypeptide representing artificial human antibody CDR-L2 region
SAS

SEQ ID NO: 1357 - protein, 3 aa, Artificial Sequence
  Synthetic polypeptide representing artificial human antibody CDR-L2 region
AAS

SEQ ID NO: 1358 - protein, 3 aa, Artificial Sequence
  Synthetic polypeptide representing artificial human antibody CDR-L2 region
TAS

SEQ ID NO: 1359 - protein, 3 aa, Artificial Sequence
  Synthetic polypeptide representing artificial human antibody CDR-L2 region
RNN

SEQ ID NO: 1360 - protein, 3 aa, Artificial Sequence
  Synthetic polypeptide representing artificial human antibody CDR-L2 region
GKN

SEQ ID NO: 1361 - protein, 3 aa, Artificial Sequence
  Synthetic polypeptide representing artificial human antibody CDR-L2 region
YDS

SEQ ID NO: 1362 - protein, 3 aa, Artificial Sequence
  Synthetic polypeptide representing artificial human antibody CDR-L2 region
AAS

SEQ ID NO: 1363 - protein, 3 aa, Artificial Sequence
  Synthetic polypeptide representing artificial human antibody CDR-L2 region
DAS

SEQ ID NO: 1364 - protein, 3 aa, Artificial Sequence
  Synthetic polypeptide representing artificial human antibody CDR-L2 region
EDD

SEQ ID NO: 1365 - protein, 3 aa, Artificial Sequence
  Synthetic polypeptide representing artificial human antibody CDR-L2 region
GAS

SEQ ID NO: 1366 - protein, 3 aa, Artificial Sequence
  Synthetic polypeptide representing artificial human antibody CDR-L2 region
ENN

SEQ ID NO: 1367 - protein, 3 aa, Artificial Sequence
  Synthetic polypeptide representing artificial human antibody CDR-L2 region
MVS

SEQ ID NO: 1368 - protein, 3 aa, Artificial Sequence
  Synthetic polypeptide representing artificial human antibody CDR-L2 region
RDN

SEQ ID NO: 1369 - protein, 3 aa, Artificial Sequence
  Synthetic polypeptide representing artificial human antibody CDR-L2 region
SSS

SEQ ID NO: 1370 - protein, 3 aa, Artificial Sequence
  Synthetic polypeptide representing artificial human antibody CDR-L2 region
DAS

SEQ ID NO: 1371 - protein, 3 aa, Artificial Sequence
  Synthetic polypeptide representing artificial human antibody CDR-L2 region
GAS

SEQ ID NO: 1372 - protein, 3 aa, Artificial Sequence
  Synthetic polypeptide representing artificial human antibody CDR-L2 region
KDS

SEQ ID NO: 1373 - protein, 3 aa, Artificial Sequence
  Synthetic polypeptide representing artificial human antibody CDR-L2 region
DAS

SEQ ID NO: 1374 - protein, 3 aa, Artificial Sequence
  Synthetic polypeptide representing artificial human antibody CDR-L2 region
DAS

SEQ ID NO: 1375 - protein, 3 aa, Artificial Sequence
  Synthetic polypeptide representing artificial human antibody CDR-L2 region
AAS

SEQ ID NO: 1376 - protein, 3 aa, Artificial Sequence
  Synthetic polypeptide representing artificial human antibody CDR-L2 region
WAS

SEQ ID NO: 1377 - protein, 3 aa, Artificial Sequence
  Synthetic polypeptide representing artificial human antibody CDR-L2 region
GAS

SEQ ID NO: 1378 - protein, 3 aa, Artificial Sequence
  Synthetic polypeptide representing artificial human antibody CDR-L2 region
EVS

SEQ ID NO: 1379 - protein, 3 aa, Artificial Sequence
  Synthetic polypeptide representing artificial human antibody CDR-L2 region
RID

SEQ ID NO: 1380 - protein, 3 aa, Artificial Sequence
  Synthetic polypeptide representing artificial human antibody CDR-L2 region
AAS

SEQ ID NO: 1381 - protein, 3 aa, Artificial Sequence
  Synthetic polypeptide representing artificial human antibody CDR-L2 region
AAS

SEQ ID NO: 1382 - protein, 3 aa, Artificial Sequence
  Synthetic polypeptide representing artificial human antibody CDR-L2 region
GDS

SEQ ID NO: 1383 - protein, 3 aa, Artificial Sequence
  Synthetic polypeptide representing artificial human antibody CDR-L2 region
DDS

SEQ ID NO: 1384 - protein, 3 aa, Artificial Sequence
  Synthetic polypeptide representing artificial human antibody CDR-L2 region
AAS

SEQ ID NO: 1385 - protein, 3 aa, Artificial Sequence
  Synthetic polypeptide representing artificial human antibody CDR-L2 region
EDI

SEQ ID NO: 1386 - protein, 3 aa, Artificial Sequence
  Synthetic polypeptide representing artificial human antibody CDR-L2 region
EVS

SEQ ID NO: 1387 - protein, 3 aa, Artificial Sequence
  Synthetic polypeptide representing artificial human antibody CDR-L2 region
DNN

SEQ ID NO: 1388 - protein, 3 aa, Artificial Sequence
  Synthetic polypeptide representing artificial human antibody CDR-L2 region
KVS

SEQ ID NO: 1389 - protein, 3 aa, Artificial Sequence
  Synthetic polypeptide representing artificial human antibody CDR-L2 region
GAS

SEQ ID NO: 1390 - protein, 3 aa, Artificial Sequence
  Synthetic polypeptide representing artificial human antibody CDR-L2 region
GNI

SEQ ID NO: 1391 - protein, 3 aa, Artificial Sequence
  Synthetic polypeptide representing artificial human antibody CDR-L2 region
AAS

SEQ ID NO: 1392 - protein, 3 aa, Artificial Sequence
  Synthetic polypeptide representing artificial human antibody CDR-L2 region
WAS

SEQ ID NO: 1393 - protein, 3 aa, Artificial Sequence
  Synthetic polypeptide representing artificial human antibody CDR-L2 region
RNN

SEQ ID NO: 1394 - protein, 3 aa, Artificial Sequence
  Synthetic polypeptide representing artificial human antibody CDR-L2 region
EDK

SEQ ID NO: 1395 - protein, 3 aa, Artificial Sequence
  Synthetic polypeptide representing artificial human antibody CDR-L2 region
AAS

SEQ ID NO: 1396 - protein, 3 aa, Artificial Sequence
  Synthetic polypeptide representing artificial human antibody CDR-L2 region
YDS

SEQ ID NO: 1397 - protein, 3 aa, Artificial Sequence
  Synthetic polypeptide representing artificial human antibody CDR-L2 region
DVS

SEQ ID NO: 1398 - protein, 3 aa, Artificial Sequence
  Synthetic polypeptide representing artificial human antibody CDR-L2 region
AAS

SEQ ID NO: 1399 - protein, 3 aa, Artificial Sequence
  Synthetic polypeptide representing artificial human antibody CDR-L2 region
AAS

SEQ ID NO: 1400 - protein, 3 aa, Artificial Sequence
  Synthetic polypeptide representing artificial human antibody CDR-L2 region
GEN

SEQ ID NO: 1401 - protein, 3 aa, Artificial Sequence
  Synthetic polypeptide representing artificial human antibody CDR-L2 region
AAS

SEQ ID NO: 1402 - protein, 3 aa, Artificial Sequence
  Synthetic polypeptide representing artificial human antibody CDR-L2 region
AAS

SEQ ID NO: 1403 - protein, 3 aa, Artificial Sequence
  Synthetic polypeptide representing artificial human antibody CDR-L2 region
GAS

SEQ ID NO: 1404 - protein, 3 aa, Artificial Sequence
  Synthetic polypeptide representing artificial human antibody CDR-L2 region
GAS

SEQ ID NO: 1405 - protein, 3 aa, Artificial Sequence
  Synthetic polypeptide representing artificial human antibody CDR-L2 region
DSS

SEQ ID NO: 1406 - protein, 3 aa, Artificial Sequence
  Synthetic polypeptide representing artificial human antibody CDR-L2 region
KAS

SEQ ID NO: 1407 - protein, 3 aa, Artificial Sequence
  Synthetic polypeptide representing artificial human antibody CDR-L2 region
YDS

SEQ ID NO: 1408 - protein, 3 aa, Artificial Sequence
  Synthetic polypeptide representing artificial human antibody CDR-L2 region
DAS

SEQ ID NO: 1409 - protein, 3 aa, Artificial Sequence
  Synthetic polypeptide representing artificial human antibody CDR-L2 region
LGS

SEQ ID NO: 1410 - protein, 3 aa, Artificial Sequence
  Synthetic polypeptide representing artificial human antibody CDR-L2 region
KAS

SEQ ID NO: 1411 - protein, 3 aa, Artificial Sequence
  Synthetic polypeptide representing artificial human antibody CDR-L2 region
NIN

SEQ ID NO: 1412 - protein, 3 aa, Artificial Sequence
  Synthetic polypeptide representing artificial human antibody CDR-L2 region
GAS

SEQ ID NO: 1413 - protein, 3 aa, Artificial Sequence
  Synthetic polypeptide representing artificial human antibody CDR-L2 region
ADR

SEQ ID NO: 1414 - protein, 3 aa, Artificial Sequence
  Synthetic polypeptide representing artificial human antibody CDR-L2 region
KAS

SEQ ID NO: 1415 - protein, 3 aa, Artificial Sequence
  Synthetic polypeptide representing artificial human antibody CDR-L2 region
EAT

SEQ ID NO: 1416 - protein, 3 aa, Artificial Sequence
  Synthetic polypeptide representing artificial human antibody CDR-L2 region
GAS

SEQ ID NO: 1417 - protein, 3 aa, Artificial Sequence
  Synthetic polypeptide representing artificial human antibody CDR-L2 region
EDS

SEQ ID NO: 1418 - protein, 3 aa, Artificial Sequence
  Synthetic polypeptide representing artificial human antibody CDR-L2 region
LGS

SEQ ID NO: 1419 - protein, 3 aa, Artificial Sequence
  Synthetic polypeptide representing artificial human antibody CDR-L2 region
EVK

SEQ ID NO: 1420 - protein, 3 aa, Artificial Sequence
  Synthetic polypeptide representing artificial human antibody CDR-L2 region
DAS

SEQ ID NO: 1421 - protein, 3 aa, Artificial Sequence
  Synthetic polypeptide representing artificial human antibody CDR-L2 region
DVS

SEQ ID NO: 1422 - protein, 3 aa, Artificial Sequence
  Synthetic polypeptide representing artificial human antibody CDR-L2 region
EVS

SEQ ID NO: 1423 - protein, 3 aa, Artificial Sequence
  Synthetic polypeptide representing artificial human antibody CDR-L2 region
GAS

SEQ ID NO: 1424 - protein, 3 aa, Artificial Sequence
  Synthetic polypeptide representing artificial human antibody CDR-L2 region
AAS

SEQ ID NO: 1425 - protein, 3 aa, Artificial Sequence
  Synthetic polypeptide representing artificial human antibody CDR-L2 region
DNN

SEQ ID NO: 1426 - protein, 3 aa, Artificial Sequence
  Synthetic polypeptide representing artificial human antibody CDR-L2 region
DVS

SEQ ID NO: 1427 - protein, 3 aa, Artificial Sequence
  Synthetic polypeptide representing artificial human antibody CDR-L2 region
GAS

SEQ ID NO: 1428 - protein, 3 aa, Artificial Sequence
  Synthetic polypeptide representing artificial human antibody CDR-L2 region
KAS

SEQ ID NO: 1429 - protein, 3 aa, Artificial Sequence
  Synthetic polypeptide representing artificial human antibody CDR-L2 region
GKN

SEQ ID NO: 1430 - protein, 3 aa, Artificial Sequence
  Synthetic polypeptide representing artificial human antibody CDR-L2 region
AAS

SEQ ID NO: 1431 - protein, 3 aa, Artificial Sequence
  Synthetic polypeptide representing artificial human antibody CDR-L2 region
DAS

SEQ ID NO: 1432 - protein, 3 aa, Artificial Sequence
  Synthetic polypeptide representing artificial human antibody CDR-L2 region
ENN

SEQ ID NO: 1433 - protein, 3 aa, Artificial Sequence
  Synthetic polypeptide representing artificial human antibody CDR-L2 region
AAS

SEQ ID NO: 1434 - protein, 3 aa, Artificial Sequence
  Synthetic polypeptide representing artificial human antibody CDR-L2 region
WAS

SEQ ID NO: 1435 - protein, 3 aa, Artificial Sequence
  Synthetic polypeptide representing artificial human antibody CDR-L2 region
DAS

SEQ ID NO: 1436 - protein, 3 aa, Artificial Sequence
  Synthetic polypeptide representing artificial human antibody CDR-L2 region
AAS

SEQ ID NO: 1437 - protein, 3 aa, Artificial Sequence
  Synthetic polypeptide representing artificial human antibody CDR-L2 region
GNI

SEQ ID NO: 1438 - protein, 3 aa, Artificial Sequence
  Synthetic polypeptide representing artificial human antibody CDR-L2 region
GAS

SEQ ID NO: 1439 - protein, 3 aa, Artificial Sequence
  Synthetic polypeptide representing artificial human antibody CDR-L2 region
DAS

SEQ ID NO: 1440 - protein, 3 aa, Artificial Sequence
  Synthetic polypeptide representing artificial human antibody CDR-L2 region
NDH

SEQ ID NO: 1441 - protein, 3 aa, Artificial Sequence
  Synthetic polypeptide representing artificial human antibody CDR-L2 region
TVS

SEQ ID NO: 1442 - protein, 3 aa, Artificial Sequence
  Synthetic polypeptide representing artificial human antibody CDR-L2 region
QDS

SEQ ID NO: 1443 - protein, 3 aa, Artificial Sequence
  Synthetic polypeptide representing artificial human antibody CDR-L2 region
QHN

SEQ ID NO: 1444 - protein, 3 aa, Artificial Sequence
  Synthetic polypeptide representing artificial human antibody CDR-L2 region
WAS

SEQ ID NO: 1445 - protein, 3 aa, Artificial Sequence
  Synthetic polypeptide representing artificial human antibody CDR-L2 region
DAS

SEQ ID NO: 1446 - protein, 3 aa, Artificial Sequence
  Synthetic polypeptide representing artificial human antibody CDR-L2 region
DAS

SEQ ID NO: 1447 - protein, 3 aa, Artificial Sequence
  Synthetic polypeptide representing artificial human antibody CDR-L2 region
LGS

SEQ ID NO: 1448 - protein, 3 aa, Artificial Sequence
  Synthetic polypeptide representing artificial human antibody CDR-L2 region
LVS

SEQ ID NO: 1449 - protein, 3 aa, Artificial Sequence
  Synthetic polypeptide representing artificial human antibody CDR-L2 region
DND

SEQ ID NO: 1450 - protein, 3 aa, Artificial Sequence
  Synthetic polypeptide representing artificial human antibody CDR-L2 region
DAS

SEQ ID NO: 1451 - protein, 3 aa, Artificial Sequence
  Synthetic polypeptide representing artificial human antibody CDR-L2 region
LGS

SEQ ID NO: 1452 - protein, 3 aa, Artificial Sequence
  Synthetic polypeptide representing artificial human antibody CDR-L2 region
DVS

SEQ ID NO: 1453 - protein, 3 aa, Artificial Sequence
  Synthetic polypeptide representing artificial human antibody CDR-L2 region
KVS

SEQ ID NO: 1454 - protein, 3 aa, Artificial Sequence
  Synthetic polypeptide representing artificial human antibody CDR-L2 region
AAS

SEQ ID NO: 1455 - protein, 3 aa, Artificial Sequence
  Synthetic polypeptide representing artificial human antibody CDR-L2 region
DAS

SEQ ID NO: 1456 - protein, 3 aa, Artificial Sequence
  Synthetic polypeptide representing artificial human antibody CDR-L2 region
DDS

SEQ ID NO: 1457 - protein, 3 aa, Artificial Sequence
  Synthetic polypeptide representing artificial human antibody CDR-L2 region
AAS

SEQ ID NO: 1458 - protein, 3 aa, Artificial Sequence
  Synthetic polypeptide representing artificial human antibody CDR-L2 region
VAS

SEQ ID NO: 1459 - protein, 3 aa, Artificial Sequence
  Synthetic polypeptide representing artificial human antibody CDR-L2 region
KAS

SEQ ID NO: 1460 - protein, 3 aa, Artificial Sequence
  Synthetic polypeptide representing artificial human antibody CDR-L2 region
ELS

SEQ ID NO: 1461 - protein, 3 aa, Artificial Sequence
  Synthetic polypeptide representing artificial human antibody CDR-L2 region
AAS

SEQ ID NO: 1462 - protein, 3 aa, Artificial Sequence
  Synthetic polypeptide representing artificial human antibody CDR-L2 region
GNR

SEQ ID NO: 1463 - protein, 3 aa, Artificial Sequence
  Synthetic polypeptide representing artificial human antibody CDR-L2 region
YAS

SEQ ID NO: 1464 - protein, 3 aa, Artificial Sequence
  Synthetic polypeptide representing artificial human antibody CDR-L2 region
GAS

SEQ ID NO: 1465 - protein, 3 aa, Artificial Sequence
  Synthetic polypeptide representing artificial human antibody CDR-L2 region
SAS

SEQ ID NO: 1466 - protein, 3 aa, Artificial Sequence
  Synthetic polypeptide representing artificial human antibody CDR-L2 region
DAS

SEQ ID NO: 1467 - protein, 3 aa, Artificial Sequence
  Synthetic polypeptide representing artificial human antibody CDR-L2 region
DVS

SEQ ID NO: 1468 - protein, 3 aa, Artificial Sequence
  Synthetic polypeptide representing artificial human antibody CDR-L2 region
EDS

SEQ ID NO: 1469 - protein, 3 aa, Artificial Sequence
  Synthetic polypeptide representing artificial human antibody CDR-L2 region
GAS

SEQ ID NO: 1470 - protein, 3 aa, Artificial Sequence
  Synthetic polypeptide representing artificial human antibody CDR-L2 region
GAS

SEQ ID NO: 1471 - protein, 3 aa, Artificial Sequence
  Synthetic polypeptide representing artificial human antibody CDR-L2 region
DVN

SEQ ID NO: 1472 - protein, 3 aa, Artificial Sequence
  Synthetic polypeptide representing artificial human antibody CDR-L2 region
ADS

SEQ ID NO: 1473 - protein, 3 aa, Artificial Sequence
  Synthetic polypeptide representing artificial human antibody CDR-L2 region
AAS

SEQ ID NO: 1474 - protein, 3 aa, Artificial Sequence
  Synthetic polypeptide representing artificial human antibody CDR-L2 region
KNN

SEQ ID NO: 1475 - protein, 3 aa, Artificial Sequence
  Synthetic polypeptide representing artificial human antibody CDR-L2 region
EAT

SEQ ID NO: 1476 - protein, 3 aa, Artificial Sequence
  Synthetic polypeptide representing artificial human antibody CDR-L2 region
VAS

SEQ ID NO: 1477 - protein, 3 aa, Artificial Sequence
  Synthetic polypeptide representing artificial human antibody CDR-L2 region
AAS

SEQ ID NO: 1478 - protein, 3 aa, Artificial Sequence
  Synthetic polypeptide representing artificial human antibody CDR-L2 region
FRN

SEQ ID NO: 1479 - protein, 3 aa, Artificial Sequence
  Synthetic polypeptide representing artificial human antibody CDR-L2 region
DTS

SEQ ID NO: 1480 - protein, 3 aa, Artificial Sequence
  Synthetic polypeptide representing artificial human antibody CDR-L2 region
YDS

SEQ ID NO: 1481 - protein, 3 aa, Artificial Sequence
  Synthetic polypeptide representing artificial human antibody CDR-L2 region
EVI

SEQ ID NO: 1482 - protein, 3 aa, Artificial Sequence
  Synthetic polypeptide representing artificial human antibody CDR-L2 region
DAF

SEQ ID NO: 1483 - protein, 3 aa, Artificial Sequence
  Synthetic polypeptide representing artificial human antibody CDR-L2 region
DKD

SEQ ID NO: 1484 - protein, 3 aa, Artificial Sequence
  Synthetic polypeptide representing artificial human antibody CDR-L2 region
SAS

SEQ ID NO: 1485 - protein, 3 aa, Artificial Sequence
  Synthetic polypeptide representing artificial human antibody CDR-L2 region
RDD

SEQ ID NO: 1486 - protein, 3 aa, Artificial Sequence
  Synthetic polypeptide representing artificial human antibody CDR-L2 region
DDS

SEQ ID NO: 1487 - protein, 3 aa, Artificial Sequence
  Synthetic polypeptide representing artificial human antibody CDR-L2 region
KDT

SEQ ID NO: 1488 - protein, 3 aa, Artificial Sequence
  Synthetic polypeptide representing artificial human antibody CDR-L2 region
KDS

SEQ ID NO: 1489 - protein, 3 aa, Artificial Sequence
  Synthetic polypeptide representing artificial human antibody CDR-L2 region
EDT

SEQ ID NO: 1490 - protein, 3 aa, Artificial Sequence
  Synthetic polypeptide representing artificial human antibody CDR-L2 region
AAS

SEQ ID NO: 1491 - protein, 3 aa, Artificial Sequence
  Synthetic polypeptide representing artificial human antibody CDR-L2 region
DAS

SEQ ID NO: 1492 - protein, 3 aa, Artificial Sequence
  Synthetic polypeptide representing artificial human antibody CDR-L2 region
DES

SEQ ID NO: 1493 - protein, 3 aa, Artificial Sequence
  Synthetic polypeptide representing artificial human antibody CDR-L2 region
DVS

SEQ ID NO: 1494 - protein, 3 aa, Artificial Sequence
  Synthetic polypeptide representing artificial human antibody CDR-L2 region
QDT

SEQ ID NO: 1495 - protein, 3 aa, Artificial Sequence
  Synthetic polypeptide representing artificial human antibody CDR-L2 region
DND

SEQ ID NO: 1496 - protein, 3 aa, Artificial Sequence
  Synthetic polypeptide representing artificial human antibody CDR-L2 region
AAS

SEQ ID NO: 1497 - protein, 3 aa, Artificial Sequence
  Synthetic polypeptide representing artificial human antibody CDR-L2 region
GAS

SEQ ID NO: 1498 - protein, 3 aa, Artificial Sequence
  Synthetic polypeptide representing artificial human antibody CDR-L2 region
DVS

SEQ ID NO: 1499 - protein, 3 aa, Artificial Sequence
  Synthetic polypeptide representing artificial human antibody CDR-L2 region
TAS

SEQ ID NO: 1500 - protein, 3 aa, Artificial Sequence
  Synthetic polypeptide representing artificial human antibody CDR-L2 region
GAS

SEQ ID NO: 1501 - protein, 3 aa, Artificial Sequence
  Synthetic polypeptide representing artificial human antibody CDR-L2 region
KDN

SEQ ID NO: 1502 - protein, 3 aa, Artificial Sequence
  Synthetic polypeptide representing artificial human antibody CDR-L2 region
DVI

SEQ ID NO: 1503 - protein, 3 aa, Artificial Sequence
  Synthetic polypeptide representing artificial human antibody CDR-L2 region
GAS

SEQ ID NO: 1504 - protein, 3 aa, Artificial Sequence
  Synthetic polypeptide representing artificial human antibody CDR-L2 region
WAS

SEQ ID NO: 1505 - protein, 3 aa, Artificial Sequence
  Synthetic polypeptide representing artificial human antibody CDR-L2 region
RNT

SEQ ID NO: 1506 - protein, 3 aa, Artificial Sequence
  Synthetic polypeptide representing artificial human antibody CDR-L2 region
EVT

SEQ ID NO: 1507 - protein, 3 aa, Artificial Sequence
  Synthetic polypeptide representing artificial human antibody CDR-L2 region
KAS

SEQ ID NO: 1508 - protein, 3 aa, Artificial Sequence
  Synthetic polypeptide representing artificial human antibody CDR-L2 region
GAS

SEQ ID NO: 1509 - protein, 7 aa, Artificial Sequence
  Synthetic polypeptide representing artificial human antibody CDR-L2 region
LNSDGSH

SEQ ID NO: 1510 - protein, 3 aa, Artificial Sequence
  Synthetic polypeptide representing artificial human antibody CDR-L2 region
GAS

SEQ ID NO: 1511 - protein, 3 aa, Artificial Sequence
  Synthetic polypeptide representing artificial human antibody CDR-L2 region
ANS

SEQ ID NO: 1512 - protein, 3 aa, Artificial Sequence
  Synthetic polypeptide representing artificial human antibody CDR-L2 region
GNS

SEQ ID NO: 1513 - protein, 3 aa, Artificial Sequence
  Synthetic polypeptide representing artificial human antibody CDR-L2 region
LGS

SEQ ID NO: 1514 - protein, 3 aa, Artificial Sequence
  Synthetic polypeptide representing artificial human antibody CDR-L2 region
AAS

SEQ ID NO: 1515 - protein, 3 aa, Artificial Sequence
  Synthetic polypeptide representing artificial human antibody CDR-L2 region
SNN

SEQ ID NO: 1516 - protein, 3 aa, Artificial Sequence
  Synthetic polypeptide representing artificial human antibody CDR-L2 region
MGS

SEQ ID NO: 1517 - protein, 3 aa, Artificial Sequence
  Synthetic polypeptide representing artificial human antibody CDR-L2 region
GKN

SEQ ID NO: 1518 - protein, 3 aa, Artificial Sequence
  Synthetic polypeptide representing artificial human antibody CDR-L2 region
KAS

SEQ ID NO: 1519 - protein, 3 aa, Artificial Sequence
  Synthetic polypeptide representing artificial human antibody CDR-L2 region
WAS

SEQ ID NO: 1520 - protein, 3 aa, Artificial Sequence
  Synthetic polypeptide representing artificial human antibody CDR-L2 region
RNN

SEQ ID NO: 1521 - protein, 3 aa, Artificial Sequence
  Synthetic polypeptide representing artificial human antibody CDR-L2 region
AAS

SEQ ID NO: 1522 - protein, 3 aa, Artificial Sequence
  Synthetic polypeptide representing artificial human antibody CDR-L2 region
DDS

SEQ ID NO: 1523 - protein, 3 aa, Artificial Sequence
  Synthetic polypeptide representing artificial human antibody CDR-L2 region
ANN

SEQ ID NO: 1524 - protein, 3 aa, Artificial Sequence
  Synthetic polypeptide representing artificial human antibody CDR-L2 region
GEN

SEQ ID NO: 1525 - protein, 3 aa, Artificial Sequence
  Synthetic polypeptide representing artificial human antibody CDR-L2 region
DVT

SEQ ID NO: 1526 - protein, 3 aa, Artificial Sequence
  Synthetic polypeptide representing artificial human antibody CDR-L2 region
WAS

SEQ ID NO: 1527 - protein, 3 aa, Artificial Sequence
  Synthetic polypeptide representing artificial human antibody CDR-L2 region
EVS

SEQ ID NO: 1528 - protein, 3 aa, Artificial Sequence
  Synthetic polypeptide representing artificial human antibody CDR-L2 region
DAS

SEQ ID NO: 1529 - protein, 3 aa, Artificial Sequence
  Synthetic polypeptide representing artificial human antibody CDR-L2 region
DDS

SEQ ID NO: 1530 - protein, 3 aa, Artificial Sequence
  Synthetic polypeptide representing artificial human antibody CDR-L2 region
GAS

SEQ ID NO: 1531 - protein, 3 aa, Artificial Sequence
  Synthetic polypeptide representing artificial human antibody CDR-L2 region
ENN

SEQ ID NO: 1532 - protein, 3 aa, Artificial Sequence
  Synthetic polypeptide representing artificial human antibody CDR-L2 region
SDS

SEQ ID NO: 1533 - protein, 3 aa, Artificial Sequence
  Synthetic polypeptide representing artificial human antibody CDR-L2 region
GPS

SEQ ID NO: 1534 - protein, 3 aa, Artificial Sequence
  Synthetic polypeptide representing artificial human antibody CDR-L2 region
EGS

SEQ ID NO: 1535 - protein, 3 aa, Artificial Sequence
  Synthetic polypeptide representing artificial human antibody CDR-L2 region
MVS

SEQ ID NO: 1536 - protein, 3 aa, Artificial Sequence
  Synthetic polypeptide representing artificial human antibody CDR-L2 region
RNN

SEQ ID NO: 1537 - protein, 3 aa, Artificial Sequence
  Synthetic polypeptide representing artificial human antibody CDR-L2 region
GKN

SEQ ID NO: 1538 - protein, 3 aa, Artificial Sequence
  Synthetic polypeptide representing artificial human antibody CDR-L2 region
AAS

SEQ ID NO: 1539 - protein, 3 aa, Artificial Sequence
  Synthetic polypeptide representing artificial human antibody CDR-L2 region
DDS

SEQ ID NO: 1540 - protein, 3 aa, Artificial Sequence
  Synthetic polypeptide representing artificial human antibody CDR-L2 region
AAS

SEQ ID NO: 1541 - protein, 3 aa, Artificial Sequence
  Synthetic polypeptide representing artificial human antibody CDR-L2 region
DAS

SEQ ID NO: 1542 - protein, 3 aa, Artificial Sequence
  Synthetic polypeptide representing artificial human antibody CDR-L2 region
LGS

SEQ ID NO: 1543 - protein, 3 aa, Artificial Sequence
  Synthetic polypeptide representing artificial human antibody CDR-L2 region
QDS

SEQ ID NO: 1544 - protein, 3 aa, Artificial Sequence
  Synthetic polypeptide representing artificial human antibody CDR-L2 region
EDS

SEQ ID NO: 1545 - protein, 3 aa, Artificial Sequence
  Synthetic polypeptide representing artificial human antibody CDR-L2 region
GKN

SEQ ID NO: 1546 - protein, 3 aa, Artificial Sequence
  Synthetic polypeptide representing artificial human antibody CDR-L2 region
WAS

SEQ ID NO: 1547 - protein, 3 aa, Artificial Sequence
  Synthetic polypeptide representing artificial human antibody CDR-L2 region
LGS

SEQ ID NO: 1548 - protein, 3 aa, Artificial Sequence
  Synthetic polypeptide representing artificial human antibody CDR-L2 region
DVS

SEQ ID NO: 1549 - protein, 3 aa, Artificial Sequence
  Synthetic polypeptide representing artificial human antibody CDR-L2 region
WAS

SEQ ID NO: 1550 - protein, 3 aa, Artificial Sequence
  Synthetic polypeptide representing artificial human antibody CDR-L2 region
EGS

SEQ ID NO: 1551 - protein, 3 aa, Artificial Sequence
  Synthetic polypeptide representing artificial human antibody CDR-L2 region
EDS

SEQ ID NO: 1552 - protein, 3 aa, Artificial Sequence
  Synthetic polypeptide representing artificial human antibody CDR-L2 region
GAS

SEQ ID NO: 1553 - protein, 3 aa, Artificial Sequence
  Synthetic polypeptide representing artificial human antibody CDR-L2 region
GAS

SEQ ID NO: 1554 - protein, 3 aa, Artificial Sequence
  Synthetic polypeptide representing artificial human antibody CDR-L2 region
YDS

SEQ ID NO: 1555 - protein, 3 aa, Artificial Sequence
  Synthetic polypeptide representing artificial human antibody CDR-L2 region
DVI

SEQ ID NO: 1556 - protein, 3 aa, Artificial Sequence
  Synthetic polypeptide representing artificial human antibody CDR-L2 region
WAS

SEQ ID NO: 1557 - protein, 3 aa, Artificial Sequence
  Synthetic polypeptide representing artificial human antibody CDR-L2 region
DDS

SEQ ID NO: 1558 - protein, 3 aa, Artificial Sequence
  Synthetic polypeptide representing artificial human antibody CDR-L2 region
SAS

SEQ ID NO: 1559 - protein, 3 aa, Artificial Sequence
  Synthetic polypeptide representing artificial human antibody CDR-L2 region
SNN

SEQ ID NO: 1560 - protein, 3 aa, Artificial Sequence
  Synthetic polypeptide representing artificial human antibody CDR-L2 region
EDH

SEQ ID NO: 1561 - protein, 3 aa, Artificial Sequence
  Synthetic polypeptide representing artificial human antibody CDR-L2 region
GNS

SEQ ID NO: 1562 - protein, 3 aa, Artificial Sequence
  Synthetic polypeptide representing artificial human antibody CDR-L2 region
AAS

SEQ ID NO: 1563 - protein, 3 aa, Artificial Sequence
  Synthetic polypeptide representing artificial human antibody CDR-L2 region
AAS

SEQ ID NO: 1564 - protein, 3 aa, Artificial Sequence
  Synthetic polypeptide representing artificial human antibody CDR-L2 region
GAS

SEQ ID NO: 1565 - protein, 3 aa, Artificial Sequence
  Synthetic polypeptide representing artificial human antibody CDR-L2 region
EVT

SEQ ID NO: 1566 - protein, 3 aa, Artificial Sequence
  Synthetic polypeptide representing artificial human antibody CDR-L2 region
GAS

SEQ ID NO: 1567 - protein, 3 aa, Artificial Sequence
  Synthetic polypeptide representing artificial human antibody CDR-L2 region
GAS

SEQ ID NO: 1568 - protein, 3 aa, Artificial Sequence
  Synthetic polypeptide representing artificial human antibody CDR-L2 region
NTN

SEQ ID NO: 1569 - protein, 3 aa, Artificial Sequence
  Synthetic polypeptide representing artificial human antibody CDR-L2 region
GND

SEQ ID NO: 1570 - protein, 3 aa, Artificial Sequence
  Synthetic polypeptide representing artificial human antibody CDR-L2 region
ANT

SEQ ID NO: 1571 - protein, 3 aa, Artificial Sequence
  Synthetic polypeptide representing artificial human antibody CDR-L2 region
ETS

SEQ ID NO: 1572 - protein, 3 aa, Artificial Sequence
  Synthetic polypeptide representing artificial human antibody CDR-L2 region
DVS

SEQ ID NO: 1573 - protein, 3 aa, Artificial Sequence
  Synthetic polypeptide representing artificial human antibody CDR-L2 region
EGS

SEQ ID NO: 1574 - protein, 3 aa, Artificial Sequence
  Synthetic polypeptide representing artificial human antibody CDR-L2 region
WAS

SEQ ID NO: 1575 - protein, 3 aa, Artificial Sequence
  Synthetic polypeptide representing artificial human antibody CDR-L2 region
SNN

SEQ ID NO: 1576 - protein, 3 aa, Artificial Sequence
  Synthetic polypeptide representing artificial human antibody CDR-L2 region
DTS

SEQ ID NO: 1577 - protein, 3 aa, Artificial Sequence
  Synthetic polypeptide representing artificial human antibody CDR-L2 region
SNN

SEQ ID NO: 1578 - protein, 3 aa, Artificial Sequence
  Synthetic polypeptide representing artificial human antibody CDR-L2 region
DAS

SEQ ID NO: 1579 - protein, 3 aa, Artificial Sequence
  Synthetic polypeptide representing artificial human antibody CDR-L2 region
AAS

SEQ ID NO: 1580 - protein, 3 aa, Artificial Sequence
  Synthetic polypeptide representing artificial human antibody CDR-L2 region
GED

SEQ ID NO: 1581 - protein, 3 aa, Artificial Sequence
  Synthetic polypeptide representing artificial human antibody CDR-L2 region
WAS

SEQ ID NO: 1582 - protein, 3 aa, Artificial Sequence
  Synthetic polypeptide representing artificial human antibody CDR-L2 region
KVS

SEQ ID NO: 1583 - protein, 3 aa, Artificial Sequence
  Synthetic polypeptide representing artificial human antibody CDR-L2 region
EDS

SEQ ID NO: 1584 - protein, 3 aa, Artificial Sequence
  Synthetic polypeptide representing artificial human antibody CDR-L2 region
DDS

SEQ ID NO: 1585 - protein, 3 aa, Artificial Sequence
  Synthetic polypeptide representing artificial human antibody CDR-L2 region
AAS

SEQ ID NO: 1586 - protein, 3 aa, Artificial Sequence
  Synthetic polypeptide representing artificial human antibody CDR-L2 region
DAS

SEQ ID NO: 1587 - protein, 3 aa, Artificial Sequence
  Synthetic polypeptide representing artificial human antibody CDR-L2 region
WAS

SEQ ID NO: 1588 - protein, 3 aa, Artificial Sequence
  Synthetic polypeptide representing artificial human antibody CDR-L2 region
KDT

SEQ ID NO: 1589 - protein, 3 aa, Artificial Sequence
  Synthetic polypeptide representing artificial human antibody CDR-L2 region
RAS

SEQ ID NO: 1590 - protein, 3 aa, Artificial Sequence
  Synthetic polypeptide representing artificial human antibody CDR-L2 region
WAS

SEQ ID NO: 1591 - protein, 3 aa, Artificial Sequence
  Synthetic polypeptide representing artificial human antibody CDR-L2 region
QDT

SEQ ID NO: 1592 - protein, 3 aa, Artificial Sequence
  Synthetic polypeptide representing artificial human antibody CDR-L2 region
SNT

SEQ ID NO: 1593 - protein, 3 aa, Artificial Sequence
  Synthetic polypeptide representing artificial human antibody CDR-L2 region
DTD

SEQ ID NO: 1594 - protein, 3 aa, Artificial Sequence
  Synthetic polypeptide representing artificial human antibody CDR-L2 region
KAS

SEQ ID NO: 1595 - protein, 3 aa, Artificial Sequence
  Synthetic polypeptide representing artificial human antibody CDR-L2 region
WAS

SEQ ID NO: 1596 - protein, 3 aa, Artificial Sequence
  Synthetic polypeptide representing artificial human antibody CDR-L2 region
WAS

SEQ ID NO: 1597 - protein, 3 aa, Artificial Sequence
  Synthetic polypeptide representing artificial human antibody CDR-L2 region
EVN

SEQ ID NO: 1598 - protein, 3 aa, Artificial Sequence
  Synthetic polypeptide representing artificial human antibody CDR-L2 region
KVS

SEQ ID NO: 1599 - protein, 3 aa, Artificial Sequence
  Synthetic polypeptide representing artificial human antibody CDR-L2 region
QDS

SEQ ID NO: 1600 - protein, 3 aa, Artificial Sequence
  Synthetic polypeptide representing artificial human antibody CDR-L2 region
GAS

SEQ ID NO: 1601 - protein, 3 aa, Artificial Sequence
  Synthetic polypeptide representing artificial human antibody CDR-L2 region
KDN

SEQ ID NO: 1602 - protein, 3 aa, Artificial Sequence
  Synthetic polypeptide representing artificial human antibody CDR-L2 region
LGS

SEQ ID NO: 1603 - protein, 3 aa, Artificial Sequence
  Synthetic polypeptide representing artificial human antibody CDR-L2 region
DNN

SEQ ID NO: 1604 - protein, 3 aa, Artificial Sequence
  Synthetic polypeptide representing artificial human antibody CDR-L2 region
KAS

SEQ ID NO: 1605 - protein, 3 aa, Artificial Sequence
  Synthetic polypeptide representing artificial human antibody CDR-L2 region
KAS

SEQ ID NO: 1606 - protein, 3 aa, Artificial Sequence
  Synthetic polypeptide representing artificial human antibody CDR-L2 region
GNS

SEQ ID NO: 1607 - protein, 3 aa, Artificial Sequence
  Synthetic polypeptide representing artificial human antibody CDR-L2 region
KDS

SEQ ID NO: 1608 - protein, 3 aa, Artificial Sequence
  Synthetic polypeptide representing artificial human antibody CDR-L2 region
SAS

SEQ ID NO: 1609 - protein, 3 aa, Artificial Sequence
  Synthetic polypeptide representing artificial human antibody CDR-L2 region
GAS

SEQ ID NO: 1610 - protein, 3 aa, Artificial Sequence
  Synthetic polypeptide representing artificial human antibody CDR-L2 region
AAS

SEQ ID NO: 1611 - protein, 3 aa, Artificial Sequence
  Synthetic polypeptide representing artificial human antibody CDR-L2 region
AAS

SEQ ID NO: 1612 - protein, 3 aa, Artificial Sequence
  Synthetic polypeptide representing artificial human antibody CDR-L2 region
GAS

SEQ ID NO: 1613 - protein, 3 aa, Artificial Sequence
  Synthetic polypeptide representing artificial human antibody CDR-L2 region
YDR

SEQ ID NO: 1614 - protein, 3 aa, Artificial Sequence
  Synthetic polypeptide representing artificial human antibody CDR-L2 region
EDK

SEQ ID NO: 1615 - protein, 3 aa, Artificial Sequence
  Synthetic polypeptide representing artificial human antibody CDR-L2 region
LGS

SEQ ID NO: 1616 - protein, 3 aa, Artificial Sequence
  Synthetic polypeptide representing artificial human antibody CDR-L2 region
KAS

SEQ ID NO: 1617 - protein, 3 aa, Artificial Sequence
  Synthetic polypeptide representing artificial human antibody CDR-L2 region
SGS

SEQ ID NO: 1618 - protein, 3 aa, Artificial Sequence
  Synthetic polypeptide representing artificial human antibody CDR-L2 region
AAS

SEQ ID NO: 1619 - protein, 3 aa, Artificial Sequence
  Synthetic polypeptide representing artificial human antibody CDR-L2 region
WAS

SEQ ID NO: 1620 - protein, 3 aa, Artificial Sequence
  Synthetic polypeptide representing artificial human antibody CDR-L2 region
RNN

SEQ ID NO: 1621 - protein, 3 aa, Artificial Sequence
  Synthetic polypeptide representing artificial human antibody CDR-L2 region
EVS

SEQ ID NO: 1622 - protein, 3 aa, Artificial Sequence
  Synthetic polypeptide representing artificial human antibody CDR-L2 region
GNG

SEQ ID NO: 1623 - protein, 7 aa, Artificial Sequence
  Synthetic polypeptide representing artificial human antibody CDR-L2 region
QYSDSDK

SEQ ID NO: 1624 - protein, 3 aa, Artificial Sequence
  Synthetic polypeptide representing artificial human antibody CDR-L2 region
LGS

SEQ ID NO: 1625 - protein, 3 aa, Artificial Sequence
  Synthetic polypeptide representing artificial human antibody CDR-L2 region
AAS

SEQ ID NO: 1626 - protein, 3 aa, Artificial Sequence
  Synthetic polypeptide representing artificial human antibody CDR-L2 region
EVS

SEQ ID NO: 1627 - protein, 14 aa, Artificial Sequence
  Synthetic polypeptide representing artificial human antibody CDR-H3 region
ARVTLGSYFYGMDV

SEQ ID NO: 1628 - protein, 15 aa, Artificial Sequence
  Synthetic polypeptide representing artificial human antibody CDR-H3 region
ARDGGSGSYFDCFDY

SEQ ID NO: 1629 - protein, 18 aa, Artificial Sequence
  Synthetic polypeptide representing artificial human antibody CDR-H3 region
AKDINFFGLGTGGGAMDV

SEQ ID NO: 1630 - protein, 11 aa, Artificial Sequence
  Synthetic polypeptide representing artificial human antibody CDR-H3 region
AHRAIVGLFDY

SEQ ID NO: 1631 - protein, 14 aa, Artificial Sequence
  Synthetic polypeptide representing artificial human antibody CDR-H3 region
ARGGDGGPQDAFDI

SEQ ID NO: 1632 - protein, 17 aa, Artificial Sequence
  Synthetic polypeptide representing artificial human antibody CDR-H3 region
VKSFSAEYYYYYYGMDV

SEQ ID NO: 1633 - protein, 15 aa, Artificial Sequence
  Synthetic polypeptide representing artificial human antibody CDR-H3 region
ARVVPGDSVYGAFDI

SEQ ID NO: 1634 - protein, 13 aa, Artificial Sequence
  Synthetic polypeptide representing artificial human antibody CDR-H3 region
AKRTPFGEWAFDY

SEQ ID NO: 1635 - protein, 17 aa, Artificial Sequence
  Synthetic polypeptide representing artificial human antibody CDR-H3 region
AKDPGTFRDHLWSGVDY

SEQ ID NO: 1636 - protein, 16 aa, Artificial Sequence
  Synthetic polypeptide representing artificial human antibody CDR-H3 region
AKAAATLPYFRFAMDV

SEQ ID NO: 1637 - protein, 17 aa, Artificial Sequence
  Synthetic polypeptide representing artificial human antibody CDR-H3 region
ARVGVFKGLAPFGGFDP

SEQ ID NO: 1638 - protein, 11 aa, Artificial Sequence
  Synthetic polypeptide representing artificial human antibody CDR-H3 region
ARDSGGTPGPY

SEQ ID NO: 1639 - protein, 16 aa, Artificial Sequence
  Synthetic polypeptide representing artificial human antibody CDR-H3 region
VRSFVGAVPAYPNFDF

SEQ ID NO: 1640 - protein, 11 aa, Artificial Sequence
  Synthetic polypeptide representing artificial human antibody CDR-H3 region
VRGVVGATLDN

SEQ ID NO: 1641 - protein, 17 aa, Artificial Sequence
  Synthetic polypeptide representing artificial human antibody CDR-H3 region
VKDSRVTGQSSGYIFDS

SEQ ID NO: 1642 - protein, 11 aa, Artificial Sequence
  Synthetic polypeptide representing artificial human antibody CDR-H3 region
ARPRLGWYFDL

SEQ ID NO: 1643 - protein, 13 aa, Artificial Sequence
  Synthetic polypeptide representing artificial human antibody CDR-H3 region
ARETAGQLIPFDY

SEQ ID NO: 1644 - protein, 17 aa, Artificial Sequence
  Synthetic polypeptide representing artificial human antibody CDR-H3 region
ARDYMGVDFYYYYGMDV

SEQ ID NO: 1645 - protein, 14 aa, Artificial Sequence
  Synthetic polypeptide representing artificial human antibody CDR-H3 region
ARDIAVAITNYFGS

SEQ ID NO: 1646 - protein, 11 aa, Artificial Sequence
  Synthetic polypeptide representing artificial human antibody CDR-H3 region
AREHRSGYQRY

SEQ ID NO: 1647 - protein, 11 aa, Artificial Sequence
  Synthetic polypeptide representing artificial human antibody CDR-H3 region
AHFSTVINFGH

SEQ ID NO: 1648 - protein, 11 aa, Artificial Sequence
  Synthetic polypeptide representing artificial human antibody CDR-H3 region
ACRRIYQGFDP

SEQ ID NO: 1649 - protein, 10 aa, Artificial Sequence
  Synthetic polypeptide representing artificial human antibody CDR-H3 region
ARDRATSFDY

SEQ ID NO: 1650 - protein, 9 aa, Artificial Sequence
  Synthetic polypeptide representing artificial human antibody CDR-H3 region
ARGRGEMDV

SEQ ID NO: 1651 - protein, 14 aa, Artificial Sequence
  Synthetic polypeptide representing artificial human antibody CDR-H3 region
ATTPSSSWYWYFDP

SEQ ID NO: 1652 - protein, 16 aa, Artificial Sequence
  Synthetic polypeptide representing artificial human antibody CDR-H3 region
ARDLELIIAAGAPLDH

SEQ ID NO: 1653 - protein, 16 aa, Artificial Sequence
  Synthetic polypeptide representing artificial human antibody CDR-H3 region
ARLVTSPEEGGPWFDP

SEQ ID NO: 1654 - protein, 12 aa, Artificial Sequence
  Synthetic polypeptide representing artificial human antibody CDR-H3 region
ARDTEVGHHFDY

SEQ ID NO: 1655 - protein, 11 aa, Artificial Sequence
  Synthetic polypeptide representing artificial human antibody CDR-H3 region
AKPWRSDGFDV

SEQ ID NO: 1656 - protein, 11 aa, Artificial Sequence
  Synthetic polypeptide representing artificial human antibody CDR-H3 region
AVGMVTDGFEI

SEQ ID NO: 1657 - protein, 12 aa, Artificial Sequence
  Synthetic polypeptide representing artificial human antibody CDR-H3 region
ARLDLRTVRFDP

SEQ ID NO: 1658 - protein, 14 aa, Artificial Sequence
  Synthetic polypeptide representing artificial human antibody CDR-H3 region
ARHSSGPPRLAFDI

SEQ ID NO: 1659 - protein, 13 aa, Artificial Sequence
  Synthetic polypeptide representing artificial human antibody CDR-H3 region
AKDFAMPTVTTDY

SEQ ID NO: 1660 - protein, 13 aa, Artificial Sequence
  Synthetic polypeptide representing artificial human antibody CDR-H3 region
VHRPSLAYWYFDV

SEQ ID NO: 1661 - protein, 14 aa, Artificial Sequence
  Synthetic polypeptide representing artificial human antibody CDR-H3 region
VREGDSRKYYSLDY

SEQ ID NO: 1662 - protein, 13 aa, Artificial Sequence
  Synthetic polypeptide representing artificial human antibody CDR-H3 region
ARDPMWVSYAFDI

SEQ ID NO: 1663 - protein, 9 aa, Artificial Sequence
  Synthetic polypeptide representing artificial human antibody CDR-H3 region
ASGYVSFDL

SEQ ID NO: 1664 - protein, 16 aa, Artificial Sequence
  Synthetic polypeptide representing artificial human antibody CDR-H3 region
AREGAYESSGPDPFDI

SEQ ID NO: 1665 - protein, 15 aa, Artificial Sequence
  Synthetic polypeptide representing artificial human antibody CDR-H3 region
ASLFLTYYGSGTYYR

SEQ ID NO: 1666 - protein, 11 aa, Artificial Sequence
  Synthetic polypeptide representing artificial human antibody CDR-H3 region
AKSTLGGGFDF

SEQ ID NO: 1667 - protein, 18 aa, Artificial Sequence
  Synthetic polypeptide representing artificial human antibody CDR-H3 region
ARVGSSSWYSSGRSPFDY

SEQ ID NO: 1668 - protein, 16 aa, Artificial Sequence
  Synthetic polypeptide representing artificial human antibody CDR-H3 region
AKDQIVLEMATSPFDY

SEQ ID NO: 1669 - protein, 17 aa, Artificial Sequence
  Synthetic polypeptide representing artificial human antibody CDR-H3 region
ARDLSCSSTSCHDAFDI

SEQ ID NO: 1670 - protein, 16 aa, Artificial Sequence
  Synthetic polypeptide representing artificial human antibody CDR-H3 region
ARGPNFHESIRDGFDI

SEQ ID NO: 1671 - protein, 12 aa, Artificial Sequence
  Synthetic polypeptide representing artificial human antibody CDR-H3 region
ARVNWNSDTFDS

SEQ ID NO: 1672 - protein, 20 aa, Artificial Sequence
  Synthetic polypeptide representing artificial human antibody CDR-H3 region
ARDPGRDPYLDLDYHYGMDV

SEQ ID NO: 1673 - protein, 16 aa, Artificial Sequence
  Synthetic polypeptide representing artificial human antibody CDR-H3 region
ARDKRSGMTSDRRIDY

SEQ ID NO: 1674 - protein, 12 aa, Artificial Sequence
  Synthetic polypeptide representing artificial human antibody CDR-H3 region
SGGYYSSSHMDV

SEQ ID NO: 1675 - protein, 13 aa, Artificial Sequence
  Synthetic polypeptide representing artificial human antibody CDR-H3 region
ARVNIAAAGTLDY

SEQ ID NO: 1676 - protein, 21 aa, Artificial Sequence
  Synthetic polypeptide representing artificial human antibody CDR-H3 region
VKDMGPAGTASAYHYHNGMDV

SEQ ID NO: 1677 - protein, 12 aa, Artificial Sequence
  Synthetic polypeptide representing artificial human antibody CDR-H3 region
ARLTTSTSALSY

SEQ ID NO: 1678 - protein, 16 aa, Artificial Sequence
  Synthetic polypeptide representing artificial human antibody CDR-H3 region
ARENWNSAGTTEWFDP

SEQ ID NO: 1679 - protein, 10 aa, Artificial Sequence
  Synthetic polypeptide representing artificial human antibody CDR-H3 region
ARDTLQKGDY

SEQ ID NO: 1680 - protein, 19 aa, Artificial Sequence
  Synthetic polypeptide representing artificial human antibody CDR-H3 region
ARASRVLESKSWHGDAFDV

SEQ ID NO: 1681 - protein, 13 aa, Artificial Sequence
  Synthetic polypeptide representing artificial human antibody CDR-H3 region
ARGLGGSGYYFDY

SEQ ID NO: 1682 - protein, 17 aa, Artificial Sequence
  Synthetic polypeptide representing artificial human antibody CDR-H3 region
ARQAFCGANCWSGAYDI

SEQ ID NO: 1683 - protein, 19 aa, Artificial Sequence
  Synthetic polypeptide representing artificial human antibody CDR-H3 region
VRRGATVFQGKIIKGYMDV

SEQ ID NO: 1684 - protein, 10 aa, Artificial Sequence
  Synthetic polypeptide representing artificial human antibody CDR-H3 region
AKVKGGSNDY

SEQ ID NO: 1685 - protein, 13 aa, Artificial Sequence
  Synthetic polypeptide representing artificial human antibody CDR-H3 region
ARHLYGDFYYLDY

SEQ ID NO: 1686 - protein, 13 aa, Artificial Sequence
  Synthetic polypeptide representing artificial human antibody CDR-H3 region
ARDHRTGSYYPDY

SEQ ID NO: 1687 - protein, 15 aa, Artificial Sequence
  Synthetic polypeptide representing artificial human antibody CDR-H3 region
ARGVRQQQVRKWFDP

SEQ ID NO: 1688 - protein, 12 aa, Artificial Sequence
  Synthetic polypeptide representing artificial human antibody CDR-H3 region
AMDNSGSGGVDY

SEQ ID NO: 1689 - protein, 12 aa, Artificial Sequence
  Synthetic polypeptide representing artificial human antibody CDR-H3 region
ARDSYHYYGMDV

SEQ ID NO: 1690 - protein, 16 aa, Artificial Sequence
  Synthetic polypeptide representing artificial human antibody CDR-H3 region
ARETVYISTYYYGLDV

SEQ ID NO: 1691 - protein, 13 aa, Artificial Sequence
  Synthetic polypeptide representing artificial human antibody CDR-H3 region
ATDGPLHTSGLDY

SEQ ID NO: 1692 - protein, 13 aa, Artificial Sequence
  Synthetic polypeptide representing artificial human antibody CDR-H3 region
ACLGAEANDAFDI

SEQ ID NO: 1693 - protein, 7 aa, Artificial Sequence
  Synthetic polypeptide representing artificial human antibody CDR-H3 region
AKVPGDY

SEQ ID NO: 1694 - protein, 15 aa, Artificial Sequence
  Synthetic polypeptide representing artificial human antibody CDR-H3 region
ARAGLSTSWPSWFDP

SEQ ID NO: 1695 - protein, 14 aa, Artificial Sequence
  Synthetic polypeptide representing artificial human antibody CDR-H3 region
ARNDISFKQSAIDV

SEQ ID NO: 1696 - protein, 17 aa, Artificial Sequence
  Synthetic polypeptide representing artificial human antibody CDR-H3 region
AKTKTMGVGGEYFGLDV

SEQ ID NO: 1697 - protein, 16 aa, Artificial Sequence
  Synthetic polypeptide representing artificial human antibody CDR-H3 region
ARHKALWFGEAGAFDI

SEQ ID NO: 1698 - protein, 18 aa, Artificial Sequence
  Synthetic polypeptide representing artificial human antibody CDR-H3 region
AKDLLGFRDQRNYYGMDV

SEQ ID NO: 1699 - protein, 13 aa, Artificial Sequence
  Synthetic polypeptide representing artificial human antibody CDR-H3 region
ARSFYDTLFYFEN

SEQ ID NO: 1700 - protein, 12 aa, Artificial Sequence
  Synthetic polypeptide representing artificial human antibody CDR-H3 region
ARVYSTKWDFDY

SEQ ID NO: 1701 - protein, 11 aa, Artificial Sequence
  Synthetic polypeptide representing artificial human antibody CDR-H3 region
AKGGPLRPFDI

SEQ ID NO: 1702 - protein, 15 aa, Artificial Sequence
  Synthetic polypeptide representing artificial human antibody CDR-H3 region
ARLSRDGYTIEHFDY

SEQ ID NO: 1703 - protein, 19 aa, Artificial Sequence
  Synthetic polypeptide representing artificial human antibody CDR-H3 region
ARRGVSGGSAWTYYNFFDP

SEQ ID NO: 1704 - protein, 14 aa, Artificial Sequence
  Synthetic polypeptide representing artificial human antibody CDR-H3 region
ARELPVIGRRTFDI

SEQ ID NO: 1705 - protein, 22 aa, Artificial Sequence
  Synthetic polypeptide representing artificial human antibody CDR-H3 region
ARDSEVEKSDGYMASTAEYFQL

SEQ ID NO: 1706 - protein, 15 aa, Artificial Sequence
  Synthetic polypeptide representing artificial human antibody CDR-H3 region
VKAGVPWEVQRWFDP

SEQ ID NO: 1707 - protein, 12 aa, Artificial Sequence
  Synthetic polypeptide representing artificial human antibody CDR-H3 region
ARDRQGLGRMDV

SEQ ID NO: 1708 - protein, 12 aa, Artificial Sequence
  Synthetic polypeptide representing artificial human antibody CDR-H3 region
ARELGANYYFAY

SEQ ID NO: 1709 - protein, 15 aa, Artificial Sequence
  Synthetic polypeptide representing artificial human antibody CDR-H3 region
AREVDIRGDSDAFDI

SEQ ID NO: 1710 - protein, 10 aa, Artificial Sequence
  Synthetic polypeptide representing artificial human antibody CDR-H3 region
ATTRNSAFLN

SEQ ID NO: 1711 - protein, 14 aa, Artificial Sequence
  Synthetic polypeptide representing artificial human antibody CDR-H3 region
AKSAFGGVPDGFDI

SEQ ID NO: 1712 - protein, 7 aa, Artificial Sequence
  Synthetic polypeptide representing artificial human antibody CDR-H3 region
ARDGFDY

SEQ ID NO: 1713 - protein, 13 aa, Artificial Sequence
  Synthetic polypeptide representing artificial human antibody CDR-H3 region
AKAGYSFTTAPDY

SEQ ID NO: 1714 - protein, 14 aa, Artificial Sequence
  Synthetic polypeptide representing artificial human antibody CDR-H3 region
ARERGQVRSYGMDV

SEQ ID NO: 1715 - protein, 19 aa, Artificial Sequence
  Synthetic polypeptide representing artificial human antibody CDR-H3 region
VKIGGDGTAYAWTFRHFDS

SEQ ID NO: 1716 - protein, 13 aa, Artificial Sequence
  Synthetic polypeptide representing artificial human antibody CDR-H3 region
ARGLGGDWNYLAY

SEQ ID NO: 1717 - protein, 21 aa, Artificial Sequence
  Synthetic polypeptide representing artificial human antibody CDR-H3 region
AKEGGWGNTVTTSYYYYGMDV

SEQ ID NO: 1718 - protein, 14 aa, Artificial Sequence
  Synthetic polypeptide representing artificial human antibody CDR-H3 region
TRDGGYFATGEFDY

SEQ ID NO: 1719 - protein, 12 aa, Artificial Sequence
  Synthetic polypeptide representing artificial human antibody CDR-H3 region
ARERFGQGALDY

SEQ ID NO: 1720 - protein, 15 aa, Artificial Sequence
  Synthetic polypeptide representing artificial human antibody CDR-H3 region
ATIVAAYSYGFEFDP

SEQ ID NO: 1721 - protein, 21 aa, Artificial Sequence
  Synthetic polypeptide representing artificial human antibody CDR-H3 region
AKEGGWGNTVTTSYYYYGMDV

SEQ ID NO: 1722 - protein, 15 aa, Artificial Sequence
  Synthetic polypeptide representing artificial human antibody CDR-H3 region
ARQGFEALVIRGFDY

SEQ ID NO: 1723 - protein, 15 aa, Artificial Sequence
  Synthetic polypeptide representing artificial human antibody CDR-H3 region
ARRSTSSPSFSTLDV

SEQ ID NO: 1724 - protein, 10 aa, Artificial Sequence
  Synthetic polypeptide representing artificial human antibody CDR-H3 region
ARQMVTTRGY

SEQ ID NO: 1725 - protein, 16 aa, Artificial Sequence
  Synthetic polypeptide representing artificial human antibody CDR-H3 region
ARVPSRYGRSRGAFDI

SEQ ID NO: 1726 - protein, 12 aa, Artificial Sequence
  Synthetic polypeptide representing artificial human antibody CDR-H3 region
ARNLYRLGWFDP

SEQ ID NO: 1727 - protein, 13 aa, Artificial Sequence
  Synthetic polypeptide representing artificial human antibody CDR-H3 region
AKSKGNYRDAMDV

SEQ ID NO: 1728 - protein, 14 aa, Artificial Sequence
  Synthetic polypeptide representing artificial human antibody CDR-H3 region
ATSYTVTTFYGMDV

SEQ ID NO: 1729 - protein, 12 aa, Artificial Sequence
  Synthetic polypeptide representing artificial human antibody CDR-H3 region
ARGAAFYYGMDV

SEQ ID NO: 1730 - protein, 15 aa, Artificial Sequence
  Synthetic polypeptide representing artificial human antibody CDR-H3 region
ARDTYGDPRGDYFDY

SEQ ID NO: 1731 - protein, 17 aa, Artificial Sequence
  Synthetic polypeptide representing artificial human antibody CDR-H3 region
ARLWGSGDWWPSLYFDS

SEQ ID NO: 1732 - protein, 13 aa, Artificial Sequence
  Synthetic polypeptide representing artificial human antibody CDR-H3 region
ARIRRIAATSFDY

SEQ ID NO: 1733 - protein, 16 aa, Artificial Sequence
  Synthetic polypeptide representing artificial human antibody CDR-H3 region
AKIARRPPSFYDYMDV

SEQ ID NO: 1734 - protein, 16 aa, Artificial Sequence
  Synthetic polypeptide representing artificial human antibody CDR-H3 region
ARSTSSSTSDFHYMDV

SEQ ID NO: 1735 - protein, 10 aa, Artificial Sequence
  Synthetic polypeptide representing artificial human antibody CDR-H3 region
TRGWAFTSSD

SEQ ID NO: 1736 - protein, 8 aa, Artificial Sequence
  Synthetic polypeptide representing artificial human antibody CDR-H3 region
AGGWALGY

SEQ ID NO: 1737 - protein, 10 aa, Artificial Sequence
  Synthetic polypeptide representing artificial human antibody CDR-H3 region
ARHRIFGLDV

SEQ ID NO: 1738 - protein, 19 aa, Artificial Sequence
  Synthetic polypeptide representing artificial human antibody CDR-H3 region
ARRGPTDTWSGEVGYYFDY

SEQ ID NO: 1739 - protein, 16 aa, Artificial Sequence
  Synthetic polypeptide representing artificial human antibody CDR-H3 region
ARDGKTLGYGGNSVDY

SEQ ID NO: 1740 - protein, 15 aa, Artificial Sequence
  Synthetic polypeptide representing artificial human antibody CDR-H3 region
ARTETKWEDRGLWDY

SEQ ID NO: 1741 - protein, 10 aa, Artificial Sequence
  Synthetic polypeptide representing artificial human antibody CDR-H3 region
ARSFYGSGLQ

SEQ ID NO: 1742 - protein, 13 aa, Artificial Sequence
  Synthetic polypeptide representing artificial human antibody CDR-H3 region
ARAMGGYTYYLDD

SEQ ID NO: 1743 - protein, 17 aa, Artificial Sequence
  Synthetic polypeptide representing artificial human antibody CDR-H3 region
ARAGKDGYNFFYYGMDV

SEQ ID NO: 1744 - protein, 15 aa, Artificial Sequence
  Synthetic polypeptide representing artificial human antibody CDR-H3 region
ARGIMTTAISYYFDY

SEQ ID NO: 1745 - protein, 18 aa, Artificial Sequence
  Synthetic polypeptide representing artificial human antibody CDR-H3 region
AKGERDLTDYGDPEYFQH

SEQ ID NO: 1746 - protein, 18 aa, Artificial Sequence
  Synthetic polypeptide representing artificial human antibody CDR-H3 region
AKDLRYCSARSSCFGIDF

SEQ ID NO: 1747 - protein, 9 aa, Artificial Sequence
  Synthetic polypeptide representing artificial human antibody CDR-H3 region
ARRAYSFDY

SEQ ID NO: 1748 - protein, 18 aa, Artificial Sequence
  Synthetic polypeptide representing artificial human antibody CDR-H3 region
AREGAPDDYGDSGTAFDI

SEQ ID NO: 1749 - protein, 12 aa, Artificial Sequence
  Synthetic polypeptide representing artificial human antibody CDR-H3 region
TTDHPYGDYSDN

SEQ ID NO: 1750 - protein, 10 aa, Artificial Sequence
  Synthetic polypeptide representing artificial human antibody CDR-H3 region
AKELLGGFDY

SEQ ID NO: 1751 - protein, 13 aa, Artificial Sequence
  Synthetic polypeptide representing artificial human antibody CDR-H3 region
ARVFGSAAGAFDI

SEQ ID NO: 1752 - protein, 12 aa, Artificial Sequence
  Synthetic polypeptide representing artificial human antibody CDR-H3 region
ARHDWRLYAFDY

SEQ ID NO: 1753 - protein, 9 aa, Artificial Sequence
  Synthetic polypeptide representing artificial human antibody CDR-H3 region
AGGETSPDY

SEQ ID NO: 1754 - protein, 15 aa, Artificial Sequence
  Synthetic polypeptide representing artificial human antibody CDR-H3 region
VSRGPLGGAAAGPDY

SEQ ID NO: 1755 - protein, 10 aa, Artificial Sequence
  Synthetic polypeptide representing artificial human antibody CDR-H3 region
ARDVRGWFVP

SEQ ID NO: 1756 - protein, 19 aa, Artificial Sequence
  Synthetic polypeptide representing artificial human antibody CDR-H3 region
VRDRNIVSVPGAIPYGMDV

SEQ ID NO: 1757 - protein, 9 aa, Artificial Sequence
  Synthetic polypeptide representing artificial human antibody CDR-H3 region
ARGSDTLDY

SEQ ID NO: 1758 - protein, 12 aa, Artificial Sequence
  Synthetic polypeptide representing artificial human antibody CDR-H3 region
ARVGLTFALFDP

SEQ ID NO: 1759 - protein, 17 aa, Artificial Sequence
  Synthetic polypeptide representing artificial human antibody CDR-H3 region
ANSAGIQLWSSDNWFDP

SEQ ID NO: 1760 - protein, 10 aa, Artificial Sequence
  Synthetic polypeptide representing artificial human antibody CDR-H3 region
AKEGIELMIL

SEQ ID NO: 1761 - protein, 14 aa, Artificial Sequence
  Synthetic polypeptide representing artificial human antibody CDR-H3 region
ARGITLTRGVSFDY

SEQ ID NO: 1762 - protein, 9 aa, Artificial Sequence
  Synthetic polypeptide representing artificial human antibody CDR-H3 region
ARDGGAFDI

SEQ ID NO: 1763 - protein, 16 aa, Artificial Sequence
  Synthetic polypeptide representing artificial human antibody CDR-H3 region
ARDRLFTAINSGYFDY

SEQ ID NO: 1764 - protein, 11 aa, Artificial Sequence
  Synthetic polypeptide representing artificial human antibody CDR-H3 region
AREGSYYGIGY

SEQ ID NO: 1765 - protein, 14 aa, Artificial Sequence
  Synthetic polypeptide representing artificial human antibody CDR-H3 region
ARDTDSGWLDSFDY

SEQ ID NO: 1766 - protein, 21 aa, Artificial Sequence
  Synthetic polypeptide representing artificial human antibody CDR-H3 region
ATDQGCDDGSCYVGHYYGMDV

SEQ ID NO: 1767 - protein, 10 aa, Artificial Sequence
  Synthetic polypeptide representing artificial human antibody CDR-H3 region
GRIMTPSIDL

SEQ ID NO: 1768 - protein, 13 aa, Artificial Sequence
  Synthetic polypeptide representing artificial human antibody CDR-H3 region
AREGRGGGDFFDY

SEQ ID NO: 1769 - protein, 15 aa, Artificial Sequence
  Synthetic polypeptide representing artificial human antibody CDR-H3 region
AKDGDSLGDFSTFDI

SEQ ID NO: 1770 - protein, 12 aa, Artificial Sequence
  Synthetic polypeptide representing artificial human antibody CDR-H3 region
ARDGYDFRAFDH

SEQ ID NO: 1771 - protein, 20 aa, Artificial Sequence
  Synthetic polypeptide representing artificial human antibody CDR-H3 region
ARARGGGFCSNMDCPAMFDY

SEQ ID NO: 1772 - protein, 9 aa, Artificial Sequence
  Synthetic polypeptide representing artificial human antibody CDR-H3 region
TTIHDYGDH

SEQ ID NO: 1773 - protein, 10 aa, Artificial Sequence
  Synthetic polypeptide representing artificial human antibody CDR-H3 region
ARGLLRSLDV

SEQ ID NO: 1774 - protein, 14 aa, Artificial Sequence
  Synthetic polypeptide representing artificial human antibody CDR-H3 region
ARVKLGASSRVFDV

SEQ ID NO: 1775 - protein, 13 aa, Artificial Sequence
  Synthetic polypeptide representing artificial human antibody CDR-H3 region
ATTVTPKVTSFAS

SEQ ID NO: 1776 - protein, 15 aa, Artificial Sequence
  Synthetic polypeptide representing artificial human antibody CDR-H3 region
AREQSPLYFGPSLDV

SEQ ID NO: 1777 - protein, 12 aa, Artificial Sequence
  Synthetic polypeptide representing artificial human antibody CDR-H3 region
AREPYSSYAMDV

SEQ ID NO: 1778 - protein, 12 aa, Artificial Sequence
  Synthetic polypeptide representing artificial human antibody CDR-H3 region
AKDGSEMLLCDY

SEQ ID NO: 1779 - protein, 11 aa, Artificial Sequence
  Synthetic polypeptide representing artificial human antibody CDR-H3 region
ARDTRWRGLDS

SEQ ID NO: 1780 - protein, 13 aa, Artificial Sequence
  Synthetic polypeptide representing artificial human antibody CDR-H3 region
AKDLLAVPGLLDD

SEQ ID NO: 1781 - protein, 14 aa, Artificial Sequence
  Synthetic polypeptide representing artificial human antibody CDR-H3 region
ASRGGSSRRYGMGV

SEQ ID NO: 1782 - protein, 16 aa, Artificial Sequence
  Synthetic polypeptide representing artificial human antibody CDR-H3 region
VKLKGIGAMWTYAMDV

SEQ ID NO: 1783 - protein, 18 aa, Artificial Sequence
  Synthetic polypeptide representing artificial human antibody CDR-H3 region
ARDQGYGDYDYPRDWIEP

SEQ ID NO: 1784 - protein, 16 aa, Artificial Sequence
  Synthetic polypeptide representing artificial human antibody CDR-H3 region
ASVRDLVSGTTYYYHY

SEQ ID NO: 1785 - protein, 10 aa, Artificial Sequence
  Synthetic polypeptide representing artificial human antibody CDR-H3 region
ARYGDYSFDP

SEQ ID NO: 1786 - protein, 13 aa, Artificial Sequence
  Synthetic polypeptide representing artificial human antibody CDR-H3 region
ARVVDTVLADFDY

SEQ ID NO: 1787 - protein, 14 aa, Artificial Sequence
  Synthetic polypeptide representing artificial human antibody CDR-H3 region
ARSGGFGWSRDLDY

SEQ ID NO: 1788 - protein, 16 aa, Artificial Sequence
  Synthetic polypeptide representing artificial human antibody CDR-H3 region
ARHGFWSGPIPDAFDI

SEQ ID NO: 1789 - protein, 12 aa, Artificial Sequence
  Synthetic polypeptide representing artificial human antibody CDR-H3 region
AHEDYGSGNGNY

SEQ ID NO: 1790 - protein, 15 aa, Artificial Sequence
  Synthetic polypeptide representing artificial human antibody CDR-H3 region
ARDRDSGYERNCLDP

SEQ ID NO: 1791 - protein, 22 aa, Artificial Sequence
  Synthetic polypeptide representing artificial human antibody CDR-H3 region
ARGAPYGSRIYYDYDSYHGMDV

SEQ ID NO: 1792 - protein, 16 aa, Artificial Sequence
  Synthetic polypeptide representing artificial human antibody CDR-H3 region
ARGKFDWFPRVSSFDY

SEQ ID NO: 1793 - protein, 13 aa, Artificial Sequence
  Synthetic polypeptide representing artificial human antibody CDR-H3 region
AAAYYIDTSGFDY

SEQ ID NO: 1794 - protein, 18 aa, Artificial Sequence
  Synthetic polypeptide representing artificial human antibody CDR-H3 region
AKGRTYSNNWLFHWYFDL

SEQ ID NO: 1795 - protein, 13 aa, Artificial Sequence
  Synthetic polypeptide representing artificial human antibody CDR-H3 region
ARVFSTIFHGVDP

SEQ ID NO: 1796 - protein, 15 aa, Artificial Sequence
  Synthetic polypeptide representing artificial human antibody CDR-H3 region
ARHLSSGEYHYGLDV

SEQ ID NO: 1797 - protein, 13 aa, Artificial Sequence
  Synthetic polypeptide representing artificial human antibody CDR-H3 region
AKGKGIVGATFDY

SEQ ID NO: 1798 - protein, 18 aa, Artificial Sequence
  Synthetic polypeptide representing artificial human antibody CDR-H3 region
ARDALDFDWLLSAGGFDY

SEQ ID NO: 1799 - protein, 11 aa, Artificial Sequence
  Synthetic polypeptide representing artificial human antibody CDR-H3 region
ARLLVGGAFDI

SEQ ID NO: 1800 - protein, 18 aa, Artificial Sequence
  Synthetic polypeptide representing artificial human antibody CDR-H3 region
TPGSCSGGSCYSGDAFDI

SEQ ID NO: 1801 - protein, 15 aa, Artificial Sequence
  Synthetic polypeptide representing artificial human antibody CDR-H3 region
ARESLDSASYSTIAH

SEQ ID NO: 1802 - protein, 15 aa, Artificial Sequence
  Synthetic polypeptide representing artificial human antibody CDR-H3 region
ARDRGGNSWLDVFDM

SEQ ID NO: 1803 - protein, 15 aa, Artificial Sequence
  Synthetic polypeptide representing artificial human antibody CDR-H3 region
ARSPAAFGSESYFDS

SEQ ID NO: 1804 - protein, 17 aa, Artificial Sequence
  Synthetic polypeptide representing artificial human antibody CDR-H3 region
AKDLLEDPYFGDLLFDY

SEQ ID NO: 1805 - protein, 12 aa, Artificial Sequence
  Synthetic polypeptide representing artificial human antibody CDR-H3 region
VRTPAVGTDPDY

SEQ ID NO: 1806 - protein, 12 aa, Artificial Sequence
  Synthetic polypeptide representing artificial human antibody CDR-H3 region
SSGGSTSMVGRY

SEQ ID NO: 1807 - protein, 14 aa, Artificial Sequence
  Synthetic polypeptide representing artificial human antibody CDR-H3 region
ARMTPFKFGLCPDY

SEQ ID NO: 1808 - protein, 14 aa, Artificial Sequence
  Synthetic polypeptide representing artificial human antibody CDR-H3 region
ARVVVVGTDYGMDV

SEQ ID NO: 1809 - protein, 14 aa, Artificial Sequence
  Synthetic polypeptide representing artificial human antibody CDR-H3 region
ARDQGLERANWFDP

SEQ ID NO: 1810 - protein, 9 aa, Artificial Sequence
  Synthetic polypeptide representing artificial human antibody CDR-H3 region
ARGVRHFDY

SEQ ID NO: 1811 - protein, 12 aa, Artificial Sequence
  Synthetic polypeptide representing artificial human antibody CDR-H3 region
ARESPLTVVFDY

SEQ ID NO: 1812 - protein, 11 aa, Artificial Sequence
  Synthetic polypeptide representing artificial human antibody CDR-H3 region
ARESSAAGYDY

SEQ ID NO: 1813 - protein, 16 aa, Artificial Sequence
  Synthetic polypeptide representing artificial human antibody CDR-H3 region
ARKLMSGIVSRGWFDP

SEQ ID NO: 1814 - protein, 14 aa, Artificial Sequence
  Synthetic polypeptide representing artificial human antibody CDR-H3 region
ARDRGDYVTHWFDP

SEQ ID NO: 1815 - protein, 13 aa, Artificial Sequence
  Synthetic polypeptide representing artificial human antibody CDR-H3 region
ARHRVGDSPGLHY

SEQ ID NO: 1816 - protein, 12 aa, Artificial Sequence
  Synthetic polypeptide representing artificial human antibody CDR-H3 region
ASPIAVAAPFAY

SEQ ID NO: 1817 - protein, 17 aa, Artificial Sequence
  Synthetic polypeptide representing artificial human antibody CDR-H3 region
VKDYLAVGGTYYDYFDY

SEQ ID NO: 1818 - protein, 11 aa, Artificial Sequence
  Synthetic polypeptide representing artificial human antibody CDR-H3 region
ARHDYRNYFDY

SEQ ID NO: 1819 - protein, 15 aa, Artificial Sequence
  Synthetic polypeptide representing artificial human antibody CDR-H3 region
ATPPSRYGGNYYADY

SEQ ID NO: 1820 - protein, 11 aa, Artificial Sequence
  Synthetic polypeptide representing artificial human antibody CDR-H3 region
ARQGPTVAIDF

SEQ ID NO: 1821 - protein, 9 aa, Artificial Sequence
  Synthetic polypeptide representing artificial human antibody CDR-H3 region
ARRGREFDY

SEQ ID NO: 1822 - protein, 17 aa, Artificial Sequence
  Synthetic polypeptide representing artificial human antibody CDR-H3 region
AIQEKRELQLRRELDNY

SEQ ID NO: 1823 - protein, 10 aa, Artificial Sequence
  Synthetic polypeptide representing artificial human antibody CDR-H3 region
ARVFRYGMDV

SEQ ID NO: 1824 - protein, 10 aa, Artificial Sequence
  Synthetic polypeptide representing artificial human antibody CDR-H3 region
AIKEGYGLSD

SEQ ID NO: 1825 - protein, 12 aa, Artificial Sequence
  Synthetic polypeptide representing artificial human antibody CDR-H3 region
AKEDGYTQNFDY

SEQ ID NO: 1826 - protein, 14 aa, Artificial Sequence
  Synthetic polypeptide representing artificial human antibody CDR-H3 region
ARVLDFYGSSVLDY

SEQ ID NO: 1827 - protein, 8 aa, Artificial Sequence
  Synthetic polypeptide representing artificial human antibody CDR-H3 region
ARDRPGDY

SEQ ID NO: 1828 - protein, 11 aa, Artificial Sequence
  Synthetic polypeptide representing artificial human antibody CDR-H3 region
ARDLGVGSTTY

SEQ ID NO: 1829 - protein, 14 aa, Artificial Sequence
  Synthetic polypeptide representing artificial human antibody CDR-H3 region
VKDLEVSIGHNFDF

SEQ ID NO: 1830 - protein, 20 aa, Artificial Sequence
  Synthetic polypeptide representing artificial human antibody CDR-H3 region
ARDRGVVVVAATPYYYGMDV

SEQ ID NO: 1831 - protein, 17 aa, Artificial Sequence
  Synthetic polypeptide representing artificial human antibody CDR-H3 region
VHARDDYGDSAWSTGPV

SEQ ID NO: 1832 - protein, 17 aa, Artificial Sequence
  Synthetic polypeptide representing artificial human antibody CDR-H3 region
GHRRLLRGVTTTVYFDP

SEQ ID NO: 1833 - protein, 17 aa, Artificial Sequence
  Synthetic polypeptide representing artificial human antibody CDR-H3 region
ARGGELLGGFGYSGMDV

SEQ ID NO: 1834 - protein, 19 aa, Artificial Sequence
  Synthetic polypeptide representing artificial human antibody CDR-H3 region
AHYYYDSSGYYQNAEYFQY

SEQ ID NO: 1835 - protein, 21 aa, Artificial Sequence
  Synthetic polypeptide representing artificial human antibody CDR-H3 region
ARTQWGTDVEATNPYYYFMDV

SEQ ID NO: 1836 - protein, 12 aa, Artificial Sequence
  Synthetic polypeptide representing artificial human antibody CDR-H3 region
ARDQSGADRFDS

SEQ ID NO: 1837 - protein, 13 aa, Artificial Sequence
  Synthetic polypeptide representing artificial human antibody CDR-H3 region
ARSSKWTDWHFDY

SEQ ID NO: 1838 - protein, 14 aa, Artificial Sequence
  Synthetic polypeptide representing artificial human antibody CDR-H3 region
ARDLDEINSSWLDP

SEQ ID NO: 1839 - protein, 17 aa, Artificial Sequence
  Synthetic polypeptide representing artificial human antibody CDR-H3 region
AKRPTAGNSYGGYYFDH

SEQ ID NO: 1840 - protein, 19 aa, Artificial Sequence
  Synthetic polypeptide representing artificial human antibody CDR-H3 region
ARRGEVGTMVRVFRKPFDY

SEQ ID NO: 1841 - protein, 18 aa, Artificial Sequence
  Synthetic polypeptide representing artificial human antibody CDR-H3 region
ATTSTMPMPTRGRDWFDP

SEQ ID NO: 1842 - protein, 11 aa, Artificial Sequence
  Synthetic polypeptide representing artificial human antibody CDR-H3 region
AGAHGDYGLDY

SEQ ID NO: 1843 - protein, 15 aa, Artificial Sequence
  Synthetic polypeptide representing artificial human antibody CDR-H3 region
ARHQQKYSPISPLDY

SEQ ID NO: 1844 - protein, 13 aa, Artificial Sequence
  Synthetic polypeptide representing artificial human antibody CDR-H3 region
AKDARLAYYGMDV

SEQ ID NO: 1845 - protein, 12 aa, Artificial Sequence
  Synthetic polypeptide representing artificial human antibody CDR-H3 region
ARHSSGYSELAY

SEQ ID NO: 1846 - protein, 14 aa, Artificial Sequence
  Synthetic polypeptide representing artificial human antibody CDR-H3 region
ARVHNWDFYYGMDV

SEQ ID NO: 1847 - protein, 15 aa, Artificial Sequence
  Synthetic polypeptide representing artificial human antibody CDR-H3 region
TRERPPNCGSSCPET

SEQ ID NO: 1848 - protein, 12 aa, Artificial Sequence
  Synthetic polypeptide representing artificial human antibody CDR-H3 region
ARVGTSHWYSDS

SEQ ID NO: 1849 - protein, 10 aa, Artificial Sequence
  Synthetic polypeptide representing artificial human antibody CDR-H3 region
ARDEGRREGA

SEQ ID NO: 1850 - protein, 13 aa, Artificial Sequence
  Synthetic polypeptide representing artificial human antibody CDR-H3 region
ARDIALGRGGMDV

SEQ ID NO: 1851 - protein, 12 aa, Artificial Sequence
  Synthetic polypeptide representing artificial human antibody CDR-H3 region
ARHRTGQYYYNS

SEQ ID NO: 1852 - protein, 11 aa, Artificial Sequence
  Synthetic polypeptide representing artificial human antibody CDR-H3 region
AASGYGDHVAY

SEQ ID NO: 1853 - protein, 16 aa, Artificial Sequence
  Synthetic polypeptide representing artificial human antibody CDR-H3 region
ARGNGPKSGKYSDFDY

SEQ ID NO: 1854 - protein, 10 aa, Artificial Sequence
  Synthetic polypeptide representing artificial human antibody CDR-H3 region
ARDKSWYFDY

SEQ ID NO: 1855 - protein, 15 aa, Artificial Sequence
  Synthetic polypeptide representing artificial human antibody CDR-H3 region
ARSTASSGYYDAFDI

SEQ ID NO: 1856 - protein, 22 aa, Artificial Sequence
  Synthetic polypeptide representing artificial human antibody CDR-H3 region
ARDRREYSSSSRPSYHYYYMDV

SEQ ID NO: 1857 - protein, 13 aa, Artificial Sequence
  Synthetic polypeptide representing artificial human antibody CDR-H3 region
ASRYRSPSGAFDI

SEQ ID NO: 1858 - protein, 8 aa, Artificial Sequence
  Synthetic polypeptide representing artificial human antibody CDR-H3 region
TRGAVADY

SEQ ID NO: 1859 - protein, 14 aa, Artificial Sequence
  Synthetic polypeptide representing artificial human antibody CDR-H3 region
ATSHGGLVPGGENY

SEQ ID NO: 1860 - protein, 16 aa, Artificial Sequence
  Synthetic polypeptide representing artificial human antibody CDR-H3 region
VREEFGVVRGPNPFDV

SEQ ID NO: 1861 - protein, 19 aa, Artificial Sequence
  Synthetic polypeptide representing artificial human antibody CDR-H3 region
AKTRSYSSADTTRPNAPGY

SEQ ID NO: 1862 - protein, 15 aa, Artificial Sequence
  Synthetic polypeptide representing artificial human antibody CDR-H3 region
AKDGQTGTTTPYFDY

SEQ ID NO: 1863 - protein, 10 aa, Artificial Sequence
  Synthetic polypeptide representing artificial human antibody CDR-H3 region
ARAGAEGVDY

SEQ ID NO: 1864 - protein, 14 aa, Artificial Sequence
  Synthetic polypeptide representing artificial human antibody CDR-H3 region
ARRSDKAVPGTFDQ

SEQ ID NO: 1865 - protein, 15 aa, Artificial Sequence
  Synthetic polypeptide representing artificial human antibody CDR-H3 region
AHRGGKNPRYWYFDL

SEQ ID NO: 1866 - protein, 13 aa, Artificial Sequence
  Synthetic polypeptide representing artificial human antibody CDR-H3 region
ARGEGGELWAFDY

SEQ ID NO: 1867 - protein, 14 aa, Artificial Sequence
  Synthetic polypeptide representing artificial human antibody CDR-H3 region
AREGLRLARGWFHP

SEQ ID NO: 1868 - protein, 12 aa, Artificial Sequence
  Synthetic polypeptide representing artificial human antibody CDR-H3 region
ARDFDDGYDIRY

SEQ ID NO: 1869 - protein, 13 aa, Artificial Sequence
  Synthetic polypeptide representing artificial human antibody CDR-H3 region
VKSPVAANDAFDI

SEQ ID NO: 1870 - protein, 13 aa, Artificial Sequence
  Synthetic polypeptide representing artificial human antibody CDR-H3 region
ARVSVAAPTCLDY

SEQ ID NO: 1871 - protein, 15 aa, Artificial Sequence
  Synthetic polypeptide representing artificial human antibody CDR-H3 region
ARHSGHDQLPLDFDN

SEQ ID NO: 1872 - protein, 9 aa, Artificial Sequence
  Synthetic polypeptide representing artificial human antibody CDR-H3 region
AGGGSQVDF

SEQ ID NO: 1873 - protein, 17 aa, Artificial Sequence
  Synthetic polypeptide representing artificial human antibody CDR-H3 region
AHRFGRGVSYYYYGMDV

SEQ ID NO: 1874 - protein, 12 aa, Artificial Sequence
  Synthetic polypeptide representing artificial human antibody CDR-H3 region
AKDSGSNDDMDV

SEQ ID NO: 1875 - protein, 13 aa, Artificial Sequence
  Synthetic polypeptide representing artificial human antibody CDR-H3 region
ARRGFYYYYGMDV

SEQ ID NO: 1876 - protein, 10 aa, Artificial Sequence
  Synthetic polypeptide representing artificial human antibody CDR-H3 region
ASLLGGDPDY

SEQ ID NO: 1877 - protein, 20 aa, Artificial Sequence
  Synthetic polypeptide representing artificial human antibody CDR-H3 region
ARMQIVATTQTYYYYYGMDV

SEQ ID NO: 1878 - protein, 13 aa, Artificial Sequence
  Synthetic polypeptide representing artificial human antibody CDR-H3 region
ARAGYDLFGWFDP

SEQ ID NO: 1879 - protein, 19 aa, Artificial Sequence
  Synthetic polypeptide representing artificial human antibody CDR-H3 region
AKPNSPFTGSGSFHNYFDY

SEQ ID NO: 1880 - protein, 6 aa, Artificial Sequence
  Synthetic polypeptide representing artificial human antibody CDR-H3 region
ASPVRP

SEQ ID NO: 1881 - protein, 21 aa, Artificial Sequence
  Synthetic polypeptide representing artificial human antibody CDR-H3 region
ARGFCDLPACYPVPQYNWFDP

SEQ ID NO: 1882 - protein, 13 aa, Artificial Sequence
  Synthetic polypeptide representing artificial human antibody CDR-H3 region
ARYSGSYPLGFDY

SEQ ID NO: 1883 - protein, 9 aa, Artificial Sequence
  Synthetic polypeptide representing artificial human antibody CDR-H3 region
ARHEGAFDI

SEQ ID NO: 1884 - protein, 12 aa, Artificial Sequence
  Synthetic polypeptide representing artificial human antibody CDR-H3 region
TTDLAVTTRFDY

SEQ ID NO: 1885 - protein, 11 aa, Artificial Sequence
  Synthetic polypeptide representing artificial human antibody CDR-H3 region
ARSTRTDALDV

SEQ ID NO: 1886 - protein, 13 aa, Artificial Sequence
  Synthetic polypeptide representing artificial human antibody CDR-H3 region
AKNDEMDFKGYDY

SEQ ID NO: 1887 - protein, 9 aa, Artificial Sequence
  Synthetic polypeptide representing artificial human antibody CDR-H3 region
ARGELLFDH

SEQ ID NO: 1888 - protein, 10 aa, Artificial Sequence
  Synthetic polypeptide representing artificial human antibody CDR-H3 region
ARESTVVLDF

SEQ ID NO: 1889 - protein, 12 aa, Artificial Sequence
  Synthetic polypeptide representing artificial human antibody CDR-H3 region
AKRSTAVGDFDP

SEQ ID NO: 1890 - protein, 16 aa, Artificial Sequence
  Synthetic polypeptide representing artificial human antibody CDR-H3 region
ARGPSNWNGGPEHMDV

SEQ ID NO: 1891 - protein, 6 aa, Artificial Sequence
  Synthetic polypeptide representing artificial human antibody CDR-H3 region
ARDFDY

SEQ ID NO: 1892 - protein, 14 aa, Artificial Sequence
  Synthetic polypeptide representing artificial human antibody CDR-H3 region
ARDPYGSGTVWFDP

SEQ ID NO: 1893 - protein, 20 aa, Artificial Sequence
  Synthetic polypeptide representing artificial human antibody CDR-H3 region
AKTEYTFLSGSDYYQYGMDV

SEQ ID NO: 1894 - protein, 16 aa, Artificial Sequence
  Synthetic polypeptide representing artificial human antibody CDR-H3 region
ARRGLLRGSNEGRFDY

SEQ ID NO: 1895 - protein, 15 aa, Artificial Sequence
  Synthetic polypeptide representing artificial human antibody CDR-H3 region
TRRGSAWTDPYYTDV

SEQ ID NO: 1896 - protein, 11 aa, Artificial Sequence
  Synthetic polypeptide representing artificial human antibody CDR-H3 region
ARDDVPRGYDY

SEQ ID NO: 1897 - protein, 13 aa, Artificial Sequence
  Synthetic polypeptide representing artificial human antibody CDR-H3 region
AREYIVPFYGMDV

SEQ ID NO: 1898 - protein, 9 aa, Artificial Sequence
  Synthetic polypeptide representing artificial human antibody CDR-L3 region
QQTNTFPLT

SEQ ID NO: 1899 - protein, 9 aa, Artificial Sequence
  Synthetic polypeptide representing artificial human antibody CDR-L3 region
QQSYSTPPR

SEQ ID NO: 1900 - protein, 9 aa, Artificial Sequence
  Synthetic polypeptide representing artificial human antibody CDR-L3 region
QQSNSFPGT

SEQ ID NO: 1901 - protein, 11 aa, Artificial Sequence
  Synthetic polypeptide representing artificial human antibody CDR-L3 region
AAWEDSLSGPV

SEQ ID NO: 1902 - protein, 9 aa, Artificial Sequence
  Synthetic polypeptide representing artificial human antibody CDR-L3 region
NSRDRSGYV

SEQ ID NO: 1903 - protein, 11 aa, Artificial Sequence
  Synthetic polypeptide representing artificial human antibody CDR-L3 region
QVWDNGHSHWV

SEQ ID NO: 1904 - protein, 9 aa, Artificial Sequence
  Synthetic polypeptide representing artificial human antibody CDR-L3 region
QQSYRMPCS

SEQ ID NO: 1905 - protein, 10 aa, Artificial Sequence
  Synthetic polypeptide representing artificial human antibody CDR-L3 region
QQYGSSPPIT

SEQ ID NO: 1906 - protein, 9 aa, Artificial Sequence
  Synthetic polypeptide representing artificial human antibody CDR-L3 region
QSYDTTNVI

SEQ ID NO: 1907 - protein, 9 aa, Artificial Sequence
  Synthetic polypeptide representing artificial human antibody CDR-L3 region
QQYDSSPFT

SEQ ID NO: 1908 - protein, 10 aa, Artificial Sequence
  Synthetic polypeptide representing artificial human antibody CDR-L3 region
GTWDDNLSAV

SEQ ID NO: 1909 - protein, 9 aa, Artificial Sequence
  Synthetic polypeptide representing artificial human antibody CDR-L3 region
LQGTHWPPT

SEQ ID NO: 1910 - protein, 11 aa, Artificial Sequence
  Synthetic polypeptide representing artificial human antibody CDR-L3 region
AAWDDNVSGPG

SEQ ID NO: 1911 - protein, 11 aa, Artificial Sequence
  Synthetic polypeptide representing artificial human antibody CDR-L3 region
ATWDDSLNGPV

SEQ ID NO: 1912 - protein, 8 aa, Artificial Sequence
  Synthetic polypeptide representing artificial human antibody CDR-L3 region
QQYNNWWT

SEQ ID NO: 1913 - protein, 9 aa, Artificial Sequence
  Synthetic polypeptide representing artificial human antibody CDR-L3 region
QQYGSFRYT

SEQ ID NO: 1914 - protein, 10 aa, Artificial Sequence
  Synthetic polypeptide representing artificial human antibody CDR-L3 region
QSADSSDTYV

SEQ ID NO: 1915 - protein, 9 aa, Artificial Sequence
  Synthetic polypeptide representing artificial human antibody CDR-L3 region
QQRSNWPLT

SEQ ID NO: 1916 - protein, 10 aa, Artificial Sequence
  Synthetic polypeptide representing artificial human antibody CDR-L3 region
QQGSNWLALT

SEQ ID NO: 1917 - protein, 9 aa, Artificial Sequence
  Synthetic polypeptide representing artificial human antibody CDR-L3 region
QQYYINPRT

SEQ ID NO: 1918 - protein, 9 aa, Artificial Sequence
  Synthetic polypeptide representing artificial human antibody CDR-L3 region
QQYYSTPYT

SEQ ID NO: 1919 - protein, 9 aa, Artificial Sequence
  Synthetic polypeptide representing artificial human antibody CDR-L3 region
QQSFNTVLT

SEQ ID NO: 1920 - protein, 11 aa, Artificial Sequence
  Synthetic polypeptide representing artificial human antibody CDR-L3 region
SSYTITSTLWV

SEQ ID NO: 1921 - protein, 11 aa, Artificial Sequence
  Synthetic polypeptide representing artificial human antibody CDR-L3 region
AAWDDSLSGPV

SEQ ID NO: 1922 - protein, 9 aa, Artificial Sequence
  Synthetic polypeptide representing artificial human antibody CDR-L3 region
QQTYSNPWT

SEQ ID NO: 1923 - protein, 9 aa, Artificial Sequence
  Synthetic polypeptide representing artificial human antibody CDR-L3 region
QQTYSHPRT

SEQ ID NO: 1924 - protein, 11 aa, Artificial Sequence
  Synthetic polypeptide representing artificial human antibody CDR-L3 region
QSYDSSLSGYV

SEQ ID NO: 1925 - protein, 11 aa, Artificial Sequence
  Synthetic polypeptide representing artificial human antibody CDR-L3 region
QVWDSSSDHYV

SEQ ID NO: 1926 - protein, 9 aa, Artificial Sequence
  Synthetic polypeptide representing artificial human antibody CDR-L3 region
QQTSSFPRT

SEQ ID NO: 1927 - protein, 10 aa, Artificial Sequence
  Synthetic polypeptide representing artificial human antibody CDR-L3 region
QSVDITSTWV

SEQ ID NO: 1928 - protein, 11 aa, Artificial Sequence
  Synthetic polypeptide representing artificial human antibody CDR-L3 region
SSYISSLTYVL

SEQ ID NO: 1929 - protein, 11 aa, Artificial Sequence
  Synthetic polypeptide representing artificial human antibody CDR-L3 region
GTWDSSLSVGV

SEQ ID NO: 1930 - protein, 9 aa, Artificial Sequence
  Synthetic polypeptide representing artificial human antibody CDR-L3 region
MQGTHWPIT

SEQ ID NO: 1931 - protein, 9 aa, Artificial Sequence
  Synthetic polypeptide representing artificial human antibody CDR-L3 region
QQYDSSSWT

SEQ ID NO: 1932 - protein, 11 aa, Artificial Sequence
  Synthetic polypeptide representing artificial human antibody CDR-L3 region
QSYDSSLRGVV

SEQ ID NO: 1933 - protein, 9 aa, Artificial Sequence
  Synthetic polypeptide representing artificial human antibody CDR-L3 region
QQSYSTPRT

SEQ ID NO: 1934 - protein, 9 aa, Artificial Sequence
  Synthetic polypeptide representing artificial human antibody CDR-L3 region
QQYYSTPWT

SEQ ID NO: 1935 - protein, 13 aa, Artificial Sequence
  Synthetic polypeptide representing artificial human antibody CDR-L3 region
QSYDSGLSGSKVV

SEQ ID NO: 1936 - protein, 9 aa, Artificial Sequence
  Synthetic polypeptide representing artificial human antibody CDR-L3 region
QSYDLSTWV

SEQ ID NO: 1937 - protein, 9 aa, Artificial Sequence
  Synthetic polypeptide representing artificial human antibody CDR-L3 region
HQSYSTSLT

SEQ ID NO: 1938 - protein, 11 aa, Artificial Sequence
  Synthetic polypeptide representing artificial human antibody CDR-L3 region
QVWDSSSDHWV

SEQ ID NO: 1939 - protein, 10 aa, Artificial Sequence
  Synthetic polypeptide representing artificial human antibody CDR-L3 region
SSYTSSSTQV

SEQ ID NO: 1940 - protein, 9 aa, Artificial Sequence
  Synthetic polypeptide representing artificial human antibody CDR-L3 region
QQSYSTPKT

SEQ ID NO: 1941 - protein, 10 aa, Artificial Sequence
  Synthetic polypeptide representing artificial human antibody CDR-L3 region
QQFNTYPLYT

SEQ ID NO: 1942 - protein, 11 aa, Artificial Sequence
  Synthetic polypeptide representing artificial human antibody CDR-L3 region
DSRDSSGNLVV

SEQ ID NO: 1943 - protein, 9 aa, Artificial Sequence
  Synthetic polypeptide representing artificial human antibody CDR-L3 region
QQTNSFPRT

SEQ ID NO: 1944 - protein, 10 aa, Artificial Sequence
  Synthetic polypeptide representing artificial human antibody CDR-L3 region
QQSYSVPPWT

SEQ ID NO: 1945 - protein, 10 aa, Artificial Sequence
  Synthetic polypeptide representing artificial human antibody CDR-L3 region
QQYGSSPRYT

SEQ ID NO: 1946 - protein, 8 aa, Artificial Sequence
  Synthetic polypeptide representing artificial human antibody CDR-L3 region
QQYGSAWT

SEQ ID NO: 1947 - protein, 10 aa, Artificial Sequence
  Synthetic polypeptide representing artificial human antibody CDR-L3 region
QQRANWPPIT

SEQ ID NO: 1948 - protein, 9 aa, Artificial Sequence
  Synthetic polypeptide representing artificial human antibody CDR-L3 region
QQYNSYPWT

SEQ ID NO: 1949 - protein, 12 aa, Artificial Sequence
  Synthetic polypeptide representing artificial human antibody CDR-L3 region
QVWDSSSDHYVV

SEQ ID NO: 1950 - protein, 10 aa, Artificial Sequence
  Synthetic polypeptide representing artificial human antibody CDR-L3 region
QQRSNWPPLT

SEQ ID NO: 1951 - protein, 9 aa, Artificial Sequence
  Synthetic polypeptide representing artificial human antibody CDR-L3 region
MQALQTPYT

SEQ ID NO: 1952 - protein, 8 aa, Artificial Sequence
  Synthetic polypeptide representing artificial human antibody CDR-L3 region
QQYNSYST

SEQ ID NO: 1953 - protein, 10 aa, Artificial Sequence
  Synthetic polypeptide representing artificial human antibody CDR-L3 region
LLYMGSGISV

SEQ ID NO: 1954 - protein, 10 aa, Artificial Sequence
  Synthetic polypeptide representing artificial human antibody CDR-L3 region
QHYGASPPWT

SEQ ID NO: 1955 - protein, 12 aa, Artificial Sequence
  Synthetic polypeptide representing artificial human antibody CDR-L3 region
QVWDSNNDHREV

SEQ ID NO: 1956 - protein, 9 aa, Artificial Sequence
  Synthetic polypeptide representing artificial human antibody CDR-L3 region
QQYDSYPLS

SEQ ID NO: 1957 - protein, 9 aa, Artificial Sequence
  Synthetic polypeptide representing artificial human antibody CDR-L3 region
LQHDNFPYT

SEQ ID NO: 1958 - protein, 9 aa, Artificial Sequence
  Synthetic polypeptide representing artificial human antibody CDR-L3 region
QQYGSSPLT

SEQ ID NO: 1959 - protein, 11 aa, Artificial Sequence
  Synthetic polypeptide representing artificial human antibody CDR-L3 region
YSTDSSGNHGV

SEQ ID NO: 1960 - protein, 9 aa, Artificial Sequence
  Synthetic polypeptide representing artificial human antibody CDR-L3 region
MQALQTPNT

SEQ ID NO: 1961 - protein, 11 aa, Artificial Sequence
  Synthetic polypeptide representing artificial human antibody CDR-L3 region
NSYSSSSTLYV

SEQ ID NO: 1962 - protein, 10 aa, Artificial Sequence
  Synthetic polypeptide representing artificial human antibody CDR-L3 region
QQHSNWPELT

SEQ ID NO: 1963 - protein, 10 aa, Artificial Sequence
  Synthetic polypeptide representing artificial human antibody CDR-L3 region
SSYRSSGVYV

SEQ ID NO: 1964 - protein, 9 aa, Artificial Sequence
  Synthetic polypeptide representing artificial human antibody CDR-L3 region
MQSIHLPYT

SEQ ID NO: 1965 - protein, 10 aa, Artificial Sequence
  Synthetic polypeptide representing artificial human antibody CDR-L3 region
HQYGGSPPNT

SEQ ID NO: 1966 - protein, 10 aa, Artificial Sequence
  Synthetic polypeptide representing artificial human antibody CDR-L3 region
QQLNSYPPLT

SEQ ID NO: 1967 - protein, 11 aa, Artificial Sequence
  Synthetic polypeptide representing artificial human antibody CDR-L3 region
ATWDSSLTAGV

SEQ ID NO: 1968 - protein, 9 aa, Artificial Sequence
  Synthetic polypeptide representing artificial human antibody CDR-L3 region
QQRSAWPIT

SEQ ID NO: 1969 - protein, 10 aa, Artificial Sequence
  Synthetic polypeptide representing artificial human antibody CDR-L3 region
QQYGSSRKLT

SEQ ID NO: 1970 - protein, 9 aa, Artificial Sequence
  Synthetic polypeptide representing artificial human antibody CDR-L3 region
QHYDSYPWT

SEQ ID NO: 1971 - protein, 11 aa, Artificial Sequence
  Synthetic polypeptide representing artificial human antibody CDR-L3 region
CSRDSSGNPWV

SEQ ID NO: 1972 - protein, 9 aa, Artificial Sequence
  Synthetic polypeptide representing artificial human antibody CDR-L3 region
QQSYSTSLT

SEQ ID NO: 1973 - protein, 11 aa, Artificial Sequence
  Synthetic polypeptide representing artificial human antibody CDR-L3 region
QQYDSSPPMYT

SEQ ID NO: 1974 - protein, 12 aa, Artificial Sequence
  Synthetic polypeptide representing artificial human antibody CDR-L3 region
GTWDSSLSPGGV

SEQ ID NO: 1975 - protein, 8 aa, Artificial Sequence
  Synthetic polypeptide representing artificial human antibody CDR-L3 region
QQSYNART

SEQ ID NO: 1976 - protein, 10 aa, Artificial Sequence
  Synthetic polypeptide representing artificial human antibody CDR-L3 region
QQYYDTAPLT

SEQ ID NO: 1977 - protein, 9 aa, Artificial Sequence
  Synthetic polypeptide representing artificial human antibody CDR-L3 region
QQYSKWPIT

SEQ ID NO: 1978 - protein, 9 aa, Artificial Sequence
  Synthetic polypeptide representing artificial human antibody CDR-L3 region
QQTYTTPRT

SEQ ID NO: 1979 - protein, 11 aa, Artificial Sequence
  Synthetic polypeptide representing artificial human antibody CDR-L3 region
QSYDSRLSGVV

SEQ ID NO: 1980 - protein, 9 aa, Artificial Sequence
  Synthetic polypeptide representing artificial human antibody CDR-L3 region
QQYTTRPLT

SEQ ID NO: 1981 - protein, 9 aa, Artificial Sequence
  Synthetic polypeptide representing artificial human antibody CDR-L3 region
QQRSKWPLT

SEQ ID NO: 1982 - protein, 12 aa, Artificial Sequence
  Synthetic polypeptide representing artificial human antibody CDR-L3 region
ATWDDSLGGRVV

SEQ ID NO: 1983 - protein, 9 aa, Artificial Sequence
  Synthetic polypeptide representing artificial human antibody CDR-L3 region
MQRIEFPFT

SEQ ID NO: 1984 - protein, 9 aa, Artificial Sequence
  Synthetic polypeptide representing artificial human antibody CDR-L3 region
QAWDSSTAV

SEQ ID NO: 1985 - protein, 9 aa, Artificial Sequence
  Synthetic polypeptide representing artificial human antibody CDR-L3 region
QSWDSSSVL

SEQ ID NO: 1986 - protein, 9 aa, Artificial Sequence
  Synthetic polypeptide representing artificial human antibody CDR-L3 region
QQYYGRLFT

SEQ ID NO: 1987 - protein, 11 aa, Artificial Sequence
  Synthetic polypeptide representing artificial human antibody CDR-L3 region
QQRSNWPPRLP

SEQ ID NO: 1988 - protein, 10 aa, Artificial Sequence
  Synthetic polypeptide representing artificial human antibody CDR-L3 region
QQRSNWPPYT

SEQ ID NO: 1989 - protein, 9 aa, Artificial Sequence
  Synthetic polypeptide representing artificial human antibody CDR-L3 region
MQALQTPYT

SEQ ID NO: 1990 - protein, 9 aa, Artificial Sequence
  Synthetic polypeptide representing artificial human antibody CDR-L3 region
QHYDSYIGT

SEQ ID NO: 1991 - protein, 11 aa, Artificial Sequence
  Synthetic polypeptide representing artificial human antibody CDR-L3 region
GTWDSSLGGGV

SEQ ID NO: 1992 - protein, 10 aa, Artificial Sequence
  Synthetic polypeptide representing artificial human antibody CDR-L3 region
QQRSNWPPYT

SEQ ID NO: 1993 - protein, 9 aa, Artificial Sequence
  Synthetic polypeptide representing artificial human antibody CDR-L3 region
MEAEQTPGT

SEQ ID NO: 1994 - protein, 10 aa, Artificial Sequence
  Synthetic polypeptide representing artificial human antibody CDR-L3 region
SSYTSSTTVL

SEQ ID NO: 1995 - protein, 10 aa, Artificial Sequence
  Synthetic polypeptide representing artificial human antibody CDR-L3 region
MQGTHWPPIT

SEQ ID NO: 1996 - protein, 9 aa, Artificial Sequence
  Synthetic polypeptide representing artificial human antibody CDR-L3 region
HQTYSTRLT

SEQ ID NO: 1997 - protein, 9 aa, Artificial Sequence
  Synthetic polypeptide representing artificial human antibody CDR-L3 region
QQYDNLPLT

SEQ ID NO: 1998 - protein, 11 aa, Artificial Sequence
  Synthetic polypeptide representing artificial human antibody CDR-L3 region
QVWDSSSDPWV

SEQ ID NO: 1999 - protein, 10 aa, Artificial Sequence
  Synthetic polypeptide representing artificial human antibody CDR-L3 region
QQLNSYPPVT

SEQ ID NO: 2000 - protein, 9 aa, Artificial Sequence
  Synthetic polypeptide representing artificial human antibody CDR-L3 region
QQSYSTPYT

SEQ ID NO: 2001 - protein, 10 aa, Artificial Sequence
  Synthetic polypeptide representing artificial human antibody CDR-L3 region
QQYSSSSPRT

SEQ ID NO: 2002 - protein, 9 aa, Artificial Sequence
  Synthetic polypeptide representing artificial human antibody CDR-L3 region
MQSLQLPIT

SEQ ID NO: 2003 - protein, 10 aa, Artificial Sequence
  Synthetic polypeptide representing artificial human antibody CDR-L3 region
QQSYSTRLLT

SEQ ID NO: 2004 - protein, 11 aa, Artificial Sequence
  Synthetic polypeptide representing artificial human antibody CDR-L3 region
QSFDSSLRGYV

SEQ ID NO: 2005 - protein, 11 aa, Artificial Sequence
  Synthetic polypeptide representing artificial human antibody CDR-L3 region
QHRITWPPLIT

SEQ ID NO: 2006 - protein, 9 aa, Artificial Sequence
  Synthetic polypeptide representing artificial human antibody CDR-L3 region
QQYAYVPIT

SEQ ID NO: 2007 - protein, 9 aa, Artificial Sequence
  Synthetic polypeptide representing artificial human antibody CDR-L3 region
QQYYSIPLT

SEQ ID NO: 2008 - protein, 9 aa, Artificial Sequence
  Synthetic polypeptide representing artificial human antibody CDR-L3 region
QQYGSSPLW

SEQ ID NO: 2009 - protein, 10 aa, Artificial Sequence
  Synthetic polypeptide representing artificial human antibody CDR-L3 region
SSYTSSSTQV

SEQ ID NO: 2010 - protein, 11 aa, Artificial Sequence
  Synthetic polypeptide representing artificial human antibody CDR-L3 region
YSTDSSGNHRV

SEQ ID NO: 2011 - protein, 10 aa, Artificial Sequence
  Synthetic polypeptide representing artificial human antibody CDR-L3 region
QQYNNWPQYT

SEQ ID NO: 2012 - protein, 11 aa, Artificial Sequence
  Synthetic polypeptide representing artificial human antibody CDR-L3 region
QHFRSSPPTYT

SEQ ID NO: 2013 - protein, 10 aa, Artificial Sequence
  Synthetic polypeptide representing artificial human antibody CDR-L3 region
SSYSRTTTLV

SEQ ID NO: 2014 - protein, 12 aa, Artificial Sequence
  Synthetic polypeptide representing artificial human antibody CDR-L3 region
QSYDSGLSAPWV

SEQ ID NO: 2015 - protein, 9 aa, Artificial Sequence
  Synthetic polypeptide representing artificial human antibody CDR-L3 region
QQYGNSPPT

SEQ ID NO: 2016 - protein, 11 aa, Artificial Sequence
  Synthetic polypeptide representing artificial human antibody CDR-L3 region
ATWDDDLSGPV

SEQ ID NO: 2017 - protein, 9 aa, Artificial Sequence
  Synthetic polypeptide representing artificial human antibody CDR-L3 region
LQHDTFPLT

SEQ ID NO: 2018 - protein, 9 aa, Artificial Sequence
  Synthetic polypeptide representing artificial human antibody CDR-L3 region
QQYNSYSWT

SEQ ID NO: 2019 - protein, 9 aa, Artificial Sequence
  Synthetic polypeptide representing artificial human antibody CDR-L3 region
QHLTSFPYT

SEQ ID NO: 2020 - protein, 11 aa, Artificial Sequence
  Synthetic polypeptide representing artificial human antibody CDR-L3 region
GSRDSSGNPSV

SEQ ID NO: 2021 - protein, 9 aa, Artificial Sequence
  Synthetic polypeptide representing artificial human antibody CDR-L3 region
QQRSNWLYT

SEQ ID NO: 2022 - protein, 12 aa, Artificial Sequence
  Synthetic polypeptide representing artificial human antibody CDR-L3 region
QVWDSSSDHQEV

SEQ ID NO: 2023 - protein, 10 aa, Artificial Sequence
  Synthetic polypeptide representing artificial human antibody CDR-L3 region
CSYAPSNTYV

SEQ ID NO: 2024 - protein, 9 aa, Artificial Sequence
  Synthetic polypeptide representing artificial human antibody CDR-L3 region
QQRSNWPLT

SEQ ID NO: 2025 - protein, 12 aa, Artificial Sequence
  Synthetic polypeptide representing artificial human antibody CDR-L3 region
NSRDSSAHDHLL

SEQ ID NO: 2026 - protein, 10 aa, Artificial Sequence
  Synthetic polypeptide representing artificial human antibody CDR-L3 region
QHFGDSPLYI

SEQ ID NO: 2027 - protein, 9 aa, Artificial Sequence
  Synthetic polypeptide representing artificial human antibody CDR-L3 region
QVWDSSTAV

SEQ ID NO: 2028 - protein, 11 aa, Artificial Sequence
  Synthetic polypeptide representing artificial human antibody CDR-L3 region
QVWDSSSDHVV

SEQ ID NO: 2029 - protein, 11 aa, Artificial Sequence
  Synthetic polypeptide representing artificial human antibody CDR-L3 region
QSADSSGFYVV

SEQ ID NO: 2030 - protein, 9 aa, Artificial Sequence
  Synthetic polypeptide representing artificial human antibody CDR-L3 region
QSADSSSPV

SEQ ID NO: 2031 - protein, 10 aa, Artificial Sequence
  Synthetic polypeptide representing artificial human antibody CDR-L3 region
YSTDSRATGV

SEQ ID NO: 2032 - protein, 9 aa, Artificial Sequence
  Synthetic polypeptide representing artificial human antibody CDR-L3 region
QQSYSTPQT

SEQ ID NO: 2033 - protein, 9 aa, Artificial Sequence
  Synthetic polypeptide representing artificial human antibody CDR-L3 region
QQYENLPLT

SEQ ID NO: 2034 - protein, 9 aa, Artificial Sequence
  Synthetic polypeptide representing artificial human antibody CDR-L3 region
QQFDNLPLT

SEQ ID NO: 2035 - protein, 10 aa, Artificial Sequence
  Synthetic polypeptide representing artificial human antibody CDR-L3 region
SSYAGSYTWV

SEQ ID NO: 2036 - protein, 9 aa, Artificial Sequence
  Synthetic polypeptide representing artificial human antibody CDR-L3 region
QAWDSSTVV

SEQ ID NO: 2037 - protein, 11 aa, Artificial Sequence
  Synthetic polypeptide representing artificial human antibody CDR-L3 region
GTWDSSLGAYV

SEQ ID NO: 2038 - protein, 8 aa, Artificial Sequence
  Synthetic polypeptide representing artificial human antibody CDR-L3 region
QQYGSSLT

SEQ ID NO: 2039 - protein, 9 aa, Artificial Sequence
  Synthetic polypeptide representing artificial human antibody CDR-L3 region
QQYGSSPLT

SEQ ID NO: 2040 - protein, 10 aa, Artificial Sequence
  Synthetic polypeptide representing artificial human antibody CDR-L3 region
SSYTSSRSLV

SEQ ID NO: 2041 - protein, 9 aa, Artificial Sequence
  Synthetic polypeptide representing artificial human antibody CDR-L3 region
QQTYSTPWT

SEQ ID NO: 2042 - protein, 8 aa, Artificial Sequence
  Synthetic polypeptide representing artificial human antibody CDR-L3 region
QQYNNWLT

SEQ ID NO: 2043 - protein, 9 aa, Artificial Sequence
  Synthetic polypeptide representing artificial human antibody CDR-L3 region
YSTPDNNGV

SEQ ID NO: 2044 - protein, 10 aa, Artificial Sequence
  Synthetic polypeptide representing artificial human antibody CDR-L3 region
SSYTTSNSVV

SEQ ID NO: 2045 - protein, 9 aa, Artificial Sequence
  Synthetic polypeptide representing artificial human antibody CDR-L3 region
QQYDNSPLT

SEQ ID NO: 2046 - protein, 9 aa, Artificial Sequence
  Synthetic polypeptide representing artificial human antibody CDR-L3 region
QQYWGTPYT

SEQ ID NO: 2047 - protein, 10 aa, Artificial Sequence
  Synthetic polypeptide representing artificial human antibody CDR-L3 region
QSYDSGLGVV

SEQ ID NO: 2048 - protein, 10 aa, Artificial Sequence
  Synthetic polypeptide representing artificial human antibody CDR-L3 region
SSYAGINNLV

SEQ ID NO: 2049 - protein, 9 aa, Artificial Sequence
  Synthetic polypeptide representing artificial human antibody CDR-L3 region
QQYNSYSQT

SEQ ID NO: 2050 - protein, 9 aa, Artificial Sequence
  Synthetic polypeptide representing artificial human antibody CDR-L3 region
QQYTDWPYT

SEQ ID NO: 2051 - protein, 8 aa, Artificial Sequence
  Synthetic polypeptide representing artificial human antibody CDR-L3 region
QTWGTVGV

SEQ ID NO: 2052 - protein, 9 aa, Artificial Sequence
  Synthetic polypeptide representing artificial human antibody CDR-L3 region
QQYGSSPWT

SEQ ID NO: 2053 - protein, 11 aa, Artificial Sequence
  Synthetic polypeptide representing artificial human antibody CDR-L3 region
QSYDSSLSGYV

SEQ ID NO: 2054 - protein, 11 aa, Artificial Sequence
  Synthetic polypeptide representing artificial human antibody CDR-L3 region
QCFDTSLTAKV

SEQ ID NO: 2055 - protein, 9 aa, Artificial Sequence
  Synthetic polypeptide representing artificial human antibody CDR-L3 region
MQALQVPRT

SEQ ID NO: 2056 - protein, 9 aa, Artificial Sequence
  Synthetic polypeptide representing artificial human antibody CDR-L3 region
QQLNSYPLT

SEQ ID NO: 2057 - protein, 11 aa, Artificial Sequence
  Synthetic polypeptide representing artificial human antibody CDR-L3 region
AAWDDSLSGPV

SEQ ID NO: 2058 - protein, 9 aa, Artificial Sequence
  Synthetic polypeptide representing artificial human antibody CDR-L3 region
MQALQTPWT

SEQ ID NO: 2059 - protein, 12 aa, Artificial Sequence
  Synthetic polypeptide representing artificial human antibody CDR-L3 region
NSRDSSDDHLEV

SEQ ID NO: 2060 - protein, 9 aa, Artificial Sequence
  Synthetic polypeptide representing artificial human antibody CDR-L3 region
QQYNSYPRT

SEQ ID NO: 2061 - protein, 9 aa, Artificial Sequence
  Synthetic polypeptide representing artificial human antibody CDR-L3 region
QQYFTTPRT

SEQ ID NO: 2062 - protein, 12 aa, Artificial Sequence
  Synthetic polypeptide representing artificial human antibody CDR-L3 region
AAWDDGLGGLYV

SEQ ID NO: 2063 - protein, 8 aa, Artificial Sequence
  Synthetic polypeptide representing artificial human antibody CDR-L3 region
QQYNRGST

SEQ ID NO: 2064 - protein, 11 aa, Artificial Sequence
  Synthetic polypeptide representing artificial human antibody CDR-L3 region
QVWDRNSHRVI

SEQ ID NO: 2065 - protein, 11 aa, Artificial Sequence
  Synthetic polypeptide representing artificial human antibody CDR-L3 region
QSYDNSLSAWV

SEQ ID NO: 2066 - protein, 11 aa, Artificial Sequence
  Synthetic polypeptide representing artificial human antibody CDR-L3 region
NSRDSSGNHWV

SEQ ID NO: 2067 - protein, 11 aa, Artificial Sequence
  Synthetic polypeptide representing artificial human antibody CDR-L3 region
SSYIRSSTPVV

SEQ ID NO: 2068 - protein, 9 aa, Artificial Sequence
  Synthetic polypeptide representing artificial human antibody CDR-L3 region
QQYYDTPYT

SEQ ID NO: 2069 - protein, 10 aa, Artificial Sequence
  Synthetic polypeptide representing artificial human antibody CDR-L3 region
SSYTSSSTLV

SEQ ID NO: 2070 - protein, 8 aa, Artificial Sequence
  Synthetic polypeptide representing artificial human antibody CDR-L3 region
QQYDNLWT

SEQ ID NO: 2071 - protein, 12 aa, Artificial Sequence
  Synthetic polypeptide representing artificial human antibody CDR-L3 region
QVWDSSSDHLYV

SEQ ID NO: 2072 - protein, 9 aa, Artificial Sequence
  Synthetic polypeptide representing artificial human antibody CDR-L3 region
HQYGSSPRT

SEQ ID NO: 2073 - protein, 12 aa, Artificial Sequence
  Synthetic polypeptide representing artificial human antibody CDR-L3 region
GTWDSSLTGGFV

SEQ ID NO: 2074 - protein, 11 aa, Artificial Sequence
  Synthetic polypeptide representing artificial human antibody CDR-L3 region
QVWDTSNDVGV

SEQ ID NO: 2075 - protein, 9 aa, Artificial Sequence
  Synthetic polypeptide representing artificial human antibody CDR-L3 region
QQYGSSPPT

SEQ ID NO: 2076 - protein, 10 aa, Artificial Sequence
  Synthetic polypeptide representing artificial human antibody CDR-L3 region
CSYAGSSNWV

SEQ ID NO: 2077 - protein, 8 aa, Artificial Sequence
  Synthetic polypeptide representing artificial human antibody CDR-L3 region
MQGTHWSA

SEQ ID NO: 2078 - protein, 11 aa, Artificial Sequence
  Synthetic polypeptide representing artificial human antibody CDR-L3 region
AAWDDSLSGQV

SEQ ID NO: 2079 - protein, 10 aa, Artificial Sequence
  Synthetic polypeptide representing artificial human antibody CDR-L3 region
NSRDSSGNHV

SEQ ID NO: 2080 - protein, 8 aa, Artificial Sequence
  Synthetic polypeptide representing artificial human antibody CDR-L3 region
QQSYSTPT

SEQ ID NO: 2081 - protein, 11 aa, Artificial Sequence
  Synthetic polypeptide representing artificial human antibody CDR-L3 region
QVWESGGDHPV

SEQ ID NO: 2082 - protein, 9 aa, Artificial Sequence
  Synthetic polypeptide representing artificial human antibody CDR-L3 region
LQHNNYPLT

SEQ ID NO: 2083 - protein, 9 aa, Artificial Sequence
  Synthetic polypeptide representing artificial human antibody CDR-L3 region
QQYNSYPYT

SEQ ID NO: 2084 - protein, 9 aa, Artificial Sequence
  Synthetic polypeptide representing artificial human antibody CDR-L3 region
MQALQIPRT

SEQ ID NO: 2085 - protein, 9 aa, Artificial Sequence
  Synthetic polypeptide representing artificial human antibody CDR-L3 region
QAWDSNVHV

SEQ ID NO: 2086 - protein, 11 aa, Artificial Sequence
  Synthetic polypeptide representing artificial human antibody CDR-L3 region
YSTDSSGNVWV

SEQ ID NO: 2087 - protein, 11 aa, Artificial Sequence
  Synthetic polypeptide representing artificial human antibody CDR-L3 region
NSRDSSGNLYV

SEQ ID NO: 2088 - protein, 9 aa, Artificial Sequence
  Synthetic polypeptide representing artificial human antibody CDR-L3 region
QQYYSSPLT

SEQ ID NO: 2089 - protein, 10 aa, Artificial Sequence
  Synthetic polypeptide representing artificial human antibody CDR-L3 region
MQALQTPPYT

SEQ ID NO: 2090 - protein, 10 aa, Artificial Sequence
  Synthetic polypeptide representing artificial human antibody CDR-L3 region
SSYTSSSTWV

SEQ ID NO: 2091 - protein, 9 aa, Artificial Sequence
  Synthetic polypeptide representing artificial human antibody CDR-L3 region
QQSYSTPYT

SEQ ID NO: 2092 - protein, 11 aa, Artificial Sequence
  Synthetic polypeptide representing artificial human antibody CDR-L3 region
CSYAGSSTPWV

SEQ ID NO: 2093 - protein, 11 aa, Artificial Sequence
  Synthetic polypeptide representing artificial human antibody CDR-L3 region
YSPDSSGNVWV

SEQ ID NO: 2094 - protein, 5 aa, Artificial Sequence
  Synthetic polypeptide representing artificial human antibody CDR-L3 region
QSRGT

SEQ ID NO: 2095 - protein, 9 aa, Artificial Sequence
  Synthetic polypeptide representing artificial human antibody CDR-L3 region
QQYGSSHYT

SEQ ID NO: 2096 - protein, 12 aa, Artificial Sequence
  Synthetic polypeptide representing artificial human antibody CDR-L3 region
QVWDSSSDHPWV

SEQ ID NO: 2097 - protein, 11 aa, Artificial Sequence
  Synthetic polypeptide representing artificial human antibody CDR-L3 region
CSYRSSTAPVV

SEQ ID NO: 2098 - protein, 9 aa, Artificial Sequence
  Synthetic polypeptide representing artificial human antibody CDR-L3 region
QQYFSTPWT

SEQ ID NO: 2099 - protein, 11 aa, Artificial Sequence
  Synthetic polypeptide representing artificial human antibody CDR-L3 region
QVWDGYSDPLV

SEQ ID NO: 2100 - protein, 9 aa, Artificial Sequence
  Synthetic polypeptide representing artificial human antibody CDR-L3 region
QQSYYTPPT

SEQ ID NO: 2101 - protein, 12 aa, Artificial Sequence
  Synthetic polypeptide representing artificial human antibody CDR-L3 region
AAWDDSLNGLWV

SEQ ID NO: 2102 - protein, 10 aa, Artificial Sequence
  Synthetic polypeptide representing artificial human antibody CDR-L3 region
QSSDSNNHVV

SEQ ID NO: 2103 - protein, 11 aa, Artificial Sequence
  Synthetic polypeptide representing artificial human antibody CDR-L3 region
QSYDSSLSGVL

SEQ ID NO: 2104 - protein, 9 aa, Artificial Sequence
  Synthetic polypeptide representing artificial human antibody CDR-L3 region
QQSYSTPFT

SEQ ID NO: 2105 - protein, 9 aa, Artificial Sequence
  Synthetic polypeptide representing artificial human antibody CDR-L3 region
QQYDSLPLT

SEQ ID NO: 2106 - protein, 10 aa, Artificial Sequence
  Synthetic polypeptide representing artificial human antibody CDR-L3 region
QYYGGSPGFT

SEQ ID NO: 2107 - protein, 10 aa, Artificial Sequence
  Synthetic polypeptide representing artificial human antibody CDR-L3 region
CSYAGSSTYV

SEQ ID NO: 2108 - protein, 10 aa, Artificial Sequence
  Synthetic polypeptide representing artificial human antibody CDR-L3 region
QEYVKSPGFA

SEQ ID NO: 2109 - protein, 9 aa, Artificial Sequence
  Synthetic polypeptide representing artificial human antibody CDR-L3 region
QQYGTSPQT

SEQ ID NO: 2110 - protein, 10 aa, Artificial Sequence
  Synthetic polypeptide representing artificial human antibody CDR-L3 region
MLYMGSGISL

SEQ ID NO: 2111 - protein, 12 aa, Artificial Sequence
  Synthetic polypeptide representing artificial human antibody CDR-L3 region
QSNDISLSGSVV

SEQ ID NO: 2112 - protein, 11 aa, Artificial Sequence
  Synthetic polypeptide representing artificial human antibody CDR-L3 region
QSYDNSLSGGV

SEQ ID NO: 2113 - protein, 9 aa, Artificial Sequence
  Synthetic polypeptide representing artificial human antibody CDR-L3 region
QQFDISPFT

SEQ ID NO: 2114 - protein, 10 aa, Artificial Sequence
  Synthetic polypeptide representing artificial human antibody CDR-L3 region
SSYTSSSSLV

SEQ ID NO: 2115 - protein, 10 aa, Artificial Sequence
  Synthetic polypeptide representing artificial human antibody CDR-L3 region
CSFTGTSTFV

SEQ ID NO: 2116 - protein, 9 aa, Artificial Sequence
  Synthetic polypeptide representing artificial human antibody CDR-L3 region
QQYYSTPYT

SEQ ID NO: 2117 - protein, 11 aa, Artificial Sequence
  Synthetic polypeptide representing artificial human antibody CDR-L3 region
ATWDDSLNGGV

SEQ ID NO: 2118 - protein, 9 aa, Artificial Sequence
  Synthetic polypeptide representing artificial human antibody CDR-L3 region
WLISGGAPV

SEQ ID NO: 2119 - protein, 11 aa, Artificial Sequence
  Synthetic polypeptide representing artificial human antibody CDR-L3 region
QSFDSSLSRSV

SEQ ID NO: 2120 - protein, 9 aa, Artificial Sequence
  Synthetic polypeptide representing artificial human antibody CDR-L3 region
QQRNNWPIT

SEQ ID NO: 2121 - protein, 9 aa, Artificial Sequence
  Synthetic polypeptide representing artificial human antibody CDR-L3 region
LQDYNYPPT

SEQ ID NO: 2122 - protein, 11 aa, Artificial Sequence
  Synthetic polypeptide representing artificial human antibody CDR-L3 region
NSRDSSGHHWV

SEQ ID NO: 2123 - protein, 9 aa, Artificial Sequence
  Synthetic polypeptide representing artificial human antibody CDR-L3 region
QQYYSTPYT

SEQ ID NO: 2124 - protein, 10 aa, Artificial Sequence
  Synthetic polypeptide representing artificial human antibody CDR-L3 region
MQGAHWPPIT

SEQ ID NO: 2125 - protein, 10 aa, Artificial Sequence
  Synthetic polypeptide representing artificial human antibody CDR-L3 region
YSTDTIGNWV

SEQ ID NO: 2126 - protein, 11 aa, Artificial Sequence
  Synthetic polypeptide representing artificial human antibody CDR-L3 region
QVWDSSSDHWI

SEQ ID NO: 2127 - protein, 9 aa, Artificial Sequence
  Synthetic polypeptide representing artificial human antibody CDR-L3 region
QQSYSPPLT

SEQ ID NO: 2128 - protein, 10 aa, Artificial Sequence
  Synthetic polypeptide representing artificial human antibody CDR-L3 region
QHYSDWRALT

SEQ ID NO: 2129 - protein, 9 aa, Artificial Sequence
  Synthetic polypeptide representing artificial human antibody CDR-L3 region
QQYYGPLWT

SEQ ID NO: 2130 - protein, 11 aa, Artificial Sequence
  Synthetic polypeptide representing artificial human antibody CDR-L3 region
QSADSSLTYWL

SEQ ID NO: 2131 - protein, 8 aa, Artificial Sequence
  Synthetic polypeptide representing artificial human antibody CDR-L3 region
QQYSDYST

SEQ ID NO: 2132 - protein, 9 aa, Artificial Sequence
  Synthetic polypeptide representing artificial human antibody CDR-L3 region
HQYYTTPFT

SEQ ID NO: 2133 - protein, 9 aa, Artificial Sequence
  Synthetic polypeptide representing artificial human antibody CDR-L3 region
QAWDSSTAE

SEQ ID NO: 2134 - protein, 11 aa, Artificial Sequence
  Synthetic polypeptide representing artificial human antibody CDR-L3 region
VTWDDDLHGWV

SEQ ID NO: 2135 - protein, 13 aa, Artificial Sequence
  Synthetic polypeptide representing artificial human antibody CDR-L3 region
ATWDSSLRAGPVV

SEQ ID NO: 2136 - protein, 9 aa, Artificial Sequence
  Synthetic polypeptide representing artificial human antibody CDR-L3 region
QQYNAYPVT

SEQ ID NO: 2137 - protein, 9 aa, Artificial Sequence
  Synthetic polypeptide representing artificial human antibody CDR-L3 region
QQYYSTPWT

SEQ ID NO: 2138 - protein, 9 aa, Artificial Sequence
  Synthetic polypeptide representing artificial human antibody CDR-L3 region
QQYYSPPLT

SEQ ID NO: 2139 - protein, 10 aa, Artificial Sequence
  Synthetic polypeptide representing artificial human antibody CDR-L3 region
CSYTSSLTYV

SEQ ID NO: 2140 - protein, 9 aa, Artificial Sequence
  Synthetic polypeptide representing artificial human antibody CDR-L3 region
MQGTHWPYT

SEQ ID NO: 2141 - protein, 9 aa, Artificial Sequence
  Synthetic polypeptide representing artificial human antibody CDR-L3 region
QAWDSSTYV

SEQ ID NO: 2142 - protein, 10 aa, Artificial Sequence
  Synthetic polypeptide representing artificial human antibody CDR-L3 region
QQYGGSPLFT

SEQ ID NO: 2143 - protein, 9 aa, Artificial Sequence
  Synthetic polypeptide representing artificial human antibody CDR-L3 region
QTWDSSTVI

SEQ ID NO: 2144 - protein, 9 aa, Artificial Sequence
  Synthetic polypeptide representing artificial human antibody CDR-L3 region
MQALQTPYT

SEQ ID NO: 2145 - protein, 11 aa, Artificial Sequence
  Synthetic polypeptide representing artificial human antibody CDR-L3 region
GTWDSSLSAGV

SEQ ID NO: 2146 - protein, 8 aa, Artificial Sequence
  Synthetic polypeptide representing artificial human antibody CDR-L3 region
QQYNSYWT

SEQ ID NO: 2147 - protein, 9 aa, Artificial Sequence
  Synthetic polypeptide representing artificial human antibody CDR-L3 region
QQYNSYPWT

SEQ ID NO: 2148 - protein, 12 aa, Artificial Sequence
  Synthetic polypeptide representing artificial human antibody CDR-L3 region
QSYDSSLSGSGV

SEQ ID NO: 2149 - protein, 10 aa, Artificial Sequence
  Synthetic polypeptide representing artificial human antibody CDR-L3 region
QSADSSGTYV

SEQ ID NO: 2150 - protein, 9 aa, Artificial Sequence
  Synthetic polypeptide representing artificial human antibody CDR-L3 region
QQAHGFPIT

SEQ ID NO: 2151 - protein, 8 aa, Artificial Sequence
  Synthetic polypeptide representing artificial human antibody CDR-L3 region
QQYNSWPA

SEQ ID NO: 2152 - protein, 9 aa, Artificial Sequence
  Synthetic polypeptide representing artificial human antibody CDR-L3 region
QQSYNTPYT

SEQ ID NO: 2153 - protein, 9 aa, Artificial Sequence
  Synthetic polypeptide representing artificial human antibody CDR-L3 region
QQSYNTPLT

SEQ ID NO: 2154 - protein, 10 aa, Artificial Sequence
  Synthetic polypeptide representing artificial human antibody CDR-L3 region
QQYGSSPPNS

SEQ ID NO: 2155 - protein, 11 aa, Artificial Sequence
  Synthetic polypeptide representing artificial human antibody CDR-L3 region
QVWDSSSDHPV

SEQ ID NO: 2156 - protein, 10 aa, Artificial Sequence
  Synthetic polypeptide representing artificial human antibody CDR-L3 region
QSYDSNTHWV

SEQ ID NO: 2157 - protein, 9 aa, Artificial Sequence
  Synthetic polypeptide representing artificial human antibody CDR-L3 region
MQALETPRT

SEQ ID NO: 2158 - protein, 8 aa, Artificial Sequence
  Synthetic polypeptide representing artificial human antibody CDR-L3 region
QQYNSYST

SEQ ID NO: 2159 - protein, 9 aa, Artificial Sequence
  Synthetic polypeptide representing artificial human antibody CDR-L3 region
MQALQPPYT

SEQ ID NO: 2160 - protein, 10 aa, Artificial Sequence
  Synthetic polypeptide representing artificial human antibody CDR-L3 region
QQSYSTPPWT

SEQ ID NO: 2161 - protein, 9 aa, Artificial Sequence
  Synthetic polypeptide representing artificial human antibody CDR-L3 region
QQYYLVPVT

SEQ ID NO: 2162 - protein, 12 aa, Artificial Sequence
  Synthetic polypeptide representing artificial human antibody CDR-L3 region
AAWDDSLSGPYV

SEQ ID NO: 2163 - protein, 11 aa, Artificial Sequence
  Synthetic polypeptide representing artificial human antibody CDR-L3 region
SSYAGSNNFYV

SEQ ID NO: 2164 - protein, 12 aa, Artificial Sequence
  Synthetic polypeptide representing artificial human antibody CDR-L3 region
QSYDSSLSGSMI

SEQ ID NO: 2165 - protein, 8 aa, Artificial Sequence
  Synthetic polypeptide representing artificial human antibody CDR-L3 region
MIWSSLVV

SEQ ID NO: 2166 - protein, 9 aa, Artificial Sequence
  Synthetic polypeptide representing artificial human antibody CDR-L3 region
MQALQTPWT

SEQ ID NO: 2167 - protein, 9 aa, Artificial Sequence
  Synthetic polypeptide representing artificial human antibody CDR-L3 region
LQNYNYPWT

SEQ ID NO: 2168 - protein, 9 aa, Artificial Sequence
  Synthetic polypeptide representing artificial human antibody CDR-L3 region
MQGIHLPRT

SEQ ID NO: 2169 - DNA, 662 bp, Artificial Sequence
  Synthetic polynucleotide encoding artificial human antibody VH chain
gatgtgagatgcaactgttgcagtctgggggaggcctggtacagcctggggggtccctgagactctcctgtgtagcctctgaagtgacgttcaacacttatggcatgagctgggtccgccaggctccagggaaggggctggagtgggtctcatacatgagtgggggtggtggtagtatattctacgcagactccgtgaagggccggttcaccatctccagagacaattccaagaacacgctgtatctgcaaatgaacagcctgagaggcgaggacacggccgtttatttctgtgcgagggttacccttgggagttacttttacggcatggacgtctggggccaagggaccacggtcaccgtctcctcagcctccaccaagggcccatcggtcttccccctggcaccctcctccaagagcacctctgggggcacagcggccctgggctgcctggtcaaggactacttccccgaaccggtgacggtgtcgtggaactcaggcgccctgaccagcggcgtgcacaccttcccggctgtcctacagtcctcaggactctactccctcagcagcgtggtgaccgtgccctccagcagcttgggcacccagacctacatctgcaacgtgaatcacaagcccagcaacaccaaggtggacaagaaggtg

SEQ ID NO: 2170 - DNA, 660 bp, Artificial Sequence
  Synthetic polynucleotide encoding artificial human antibody VH chain
gtggtgcagctggtggagtctgggggaggcttggtccagcctggggggtccctgagactctcctgtgcagcctctggattcacctttagtagctattggatgagctgggtccgccaggctccagggaaggggctggagtgggtggccaacataaagcaagatggaagtgagaaatactatgtggactctgtgaagggccgattcaccatctccagagacaacgccaagaagtcactgtatctgcaaatgaacagcctgagagccgaggacacggctgtctattactgtgcgagagatgggggatcagggagttacttcgactgctttgactactggggccagggaaccctggtcaccgtctcctcagcctccaccaagggcccatcggtcttccccctggcaccctcctccaagagcacctctgggggcacagcggccctgggctgcctggtcaaggactacttccccgaaccggtgacggtgtcgtggaactcaggcgccctgaccagcggcgtgcacaccttcccggctgtcctacagtcctcaggactctactccctcagcagcgtggtgaccgtgccctccagcagcttgggcacccagacctacatctgcaacgtgaatcacaagcccagcaacaccaaggtggacaagagtgag

SEQ ID NO: 2171 - DNA, 669 bp, Artificial Sequence
  Synthetic polynucleotide encoding artificial human antibody VH chain
gaagtgcagttggtggagtctgggggaggcctgatacagcctggcaggtccctgagactctcctgtgcagcctctggattcacctttgaagattatgccatgcactgggtccggcaagctccagggaagggcctggagtgggtctcaggtattagttggaacagtgggaacataggctatgcggactctgtgaagggccgattcaccatctccagagacaacgccaagaactccctgtatctgcaaatgcacagtctgagacctgaggacacggccttatattactgtgcaaaagatataaacttttttgggttagggacagggggaggtgctatggacgtctggggccaagggaccacggtcaccgtctcctcagcctccaccaagggcccatcggtcttccccctggcaccctcctccaagagcacctctgggggcacagcggccctgggctgcctggtcaaggactacttccccgaaccggtgacggtgtcgtggaactcaggcgccctgaccagcggcgtgcacaccttcccggctgtcctacagtcctcaggactctactccctcagcagcgtggtgaccgtgccctccagcagcttgggcacccagacctacatctgcaacgtgaatcacaagcccagcaacaccaaggtggacaagagagag

SEQ ID NO: 2172 - DNA, 360 bp, Artificial Sequence
  Synthetic polynucleotide encoding artificial human antibody VH chain
cccagatcaccttgaaggagtctggtcctacgctggtgaaacccacacagaccctcacgctgacctgcaccttctctgggttctcactcagcactagtggagtgggtgtgggctggatccgtcagcccccaggaaaggccctggagtggcttgcactcatttattgggatgatgataagcgctacagcccatctctgaagagcaggctcaccatcaccaaggacacctccaaaaaccaggtggtccttacaatgaccaacatggaccctgtggacacagccacatattactgtgcacacagagcaatagtaggactctttgactactggggccagggaaccctggtcaccgtctcctcag

SEQ ID NO: 2173 - DNA, 669 bp, Artificial Sequence
  Synthetic polynucleotide encoding artificial human antibody VH chain
caggtgcagctggtgcagtctggggctgaggttaagaagcctggggcctcagtgaagatttcctgcaagacatctggatataccttcaccacctactatatgcactgggtgcgacaggcccctggacaggggcttgagtggatgggaataatcaacactagtggtggaagcacaagctacgcacagaagttccagggcagagtcaccatgaccagggacacgtccacgaacacagtctacatggagctgagcagcctgagatatgaagacacggccatgtattactgtgcgcgaggaggggatgggggaccccaagatgcttttgatatctggggccaagggacaaaggtcaccgtctcctcagcatccccgaccagccccaaggtcttcccgctgagcctctgcagcacccagccagatgggaacgtggtcatcgcctgcctggtccagggcttcttcccccaggagccactcagtgtgacctggagcgaaagcggacagggcgtgaccgccagaaacttcccacccagccaggatgcctccggggacctgtacaccacgagcagccagctgaccctgccggccacacagtgcctagccggcaagtccgtgacatgccacgtgaagcactacacgaatcccagccaggatgtgactgtgccctgccca

SEQ ID NO: 2174 - DNA, 666 bp, Artificial Sequence
  Synthetic polynucleotide encoding artificial human antibody VH chain
tgagtgcagctggtggactctgggggaggcttggtacagcctggcaggtccctgagactctcctgtgcagcctctggattcgtctttgatgattatgccatgcactgggtccggcaagttccagggaagggcctggagtgggtctcaggcattagttggaatagtgttagtataggctatgcggactctgtgaagggccgattcaccatctccagagacaacgccaagaattccctgtatctacaaatgaacagtctgagacctgaggacgcggccttgtattactgtgtgaagtcattttcggctgaatattactactattactacggtatggacgtctggggccaagggaccacggtcaccgtctcctcagcctccaccaagggcccatcggtcttccccctggcaccctcctccaagagcacctctgggggcacagcggccctgggctgcctggtcaaggactacttccccgaaccggtgacggtgtcgtggaactcaggcgccctgaccagcggcgtgcacaccttcccggctgtcctacagtcctcaggactctactccctcagcagcgtggtgaccgtgccctccagcagcttgggcacccagacctacatctgcaacgtgaatcacaagcccagcaacaccaaggtggacaagagtgag

SEQ ID NO: 2175 - DNA, 367 bp, Artificial Sequence
  Synthetic polynucleotide encoding artificial human antibody VH chain
caggttcaactggtgcagtctggagctgaggtgaagaagcctggggcctcagtgaaggtctcctgcaaggcttctggttacacctttaccaactatggtttcagctgggtgcgacaggccccaggacaagggcttgagtggatgggacggatcaccacttacaatcgtgacacaatctatgcacagaaattccagggcagagtcaccatgaccacagatacatccacgagcacagcctatatggaactgaggagcctgagatctgacgacacggccgtgtacttctgtgcgagagttgttccaggtgactccgtctatggtgcttttgatatctggggccaggggacaatggtcaccgtctcttcag

SEQ ID NO: 2176 - DNA, 668 bp, Artificial Sequence
  Synthetic polynucleotide encoding artificial human antibody VH chain
gtgaagtacaactggtggagtctgggggaggcgtggtacagcctggggggtccctgagactctcctgtacagcctctggattcacctttgatgattatgccatgcactgggtccgtcaagctccagggaagggtctggagtgggtctctcttattagtggggatggtggtggcacatactatgcagactctgtgaagggccgattcaccatctccagagacaacagcaaaaactccctgtatctgcaaatgaacagtctgagaactgaggacaccgccttgtattactgtgcaaagcggaccccgttcggggagtgggcatttgactactggggccagggaaccctggtcaccgtctcctcagcatccccgaccagccccaaggtcttcccgctgagcctctgcagcacccagccagatgggaacgtggtcatcgcctgcctggtccagggcttcttcccccaggagccactcagtgtgacctggagcgaaagcggacagggcgtgaccgccagaaacttcccacccagccaggatgcctccggggacctgtacaccacgagcagccagctgaccctgccggccacacagtgcctagccggcaagtccgtgacatgccacgtgaagcactacacgaatcccagccaggatgtgactgtgccctgcccg

SEQ ID NO: 2177 - DNA, 373 bp, Artificial Sequence
  Synthetic polynucleotide encoding artificial human antibody VH chain
gaggtgcagctggtggagtctgggggaggcgtggtccagcctggggggtccctgagactctcctgtgcagcgtctggattcacttttagttactatggcatgtattgggtccgccaggctccaggcaaggggcttgagtgggtgacatttatacggtatgatggaagaaataaatactatgccgactccgtgaagggccgattcaccatctccagagacaattccaagaatacgctgtatctggaaatgaataccctgagaactgaggacacggctatgtatttctgtgcgaaagatccggggacctttagggaccatctttggagtggtgttgactactggggccagggaaccctggtcaccgtctcctccg

SEQ ID NO: 2178 - DNA, 663 bp, Artificial Sequence
  Synthetic polynucleotide encoding artificial human antibody VH chain
gaagtgcaactggtggagtctgggggaggcttggtacagcctggcaggtccctgagactttcttgtgcagcctctggattcccctttggtgattatgccatgcactgggtccggcaagctccagggaagggcctggagtgggtctcaggtattggatgggacagtggtggcatcggctatgcggactctgtgaagggccgattcaccatctccagagacatcgccaagaactcgctgtatctggaaataaacagtctgagacctgacgacacggccttgtattactgtgcaaaagcggcggctacactcccctacttccgcttcgctatggacgtctggggccaggggaccccggtcaccgtctcctcagcctccaccaagggcccatcggtcttccccctggcaccctcctccaagagcacctctgggggcacagcggccctgggctgcctggtcaaggactacttccccgaaccggtgacggtgtcgtggaactcaggcgccctgaccagcggcgtgcacaccttcccggctgtcctacagtcctcaggactctactccctcagcagcgtggtgaccgtgccctccagcagcttgggcacccagacctacatctgcaacgtgaatcacaagcccagcaacaccaaggtggacaagaatgtg

SEQ ID NO: 2179 - DNA, 666 bp, Artificial Sequence
  Synthetic polynucleotide encoding artificial human antibody VH chain
ccaggtctcctggtgcagtctggaggtgaggtgaagaagcctggggcctcagtgagggtctcctgcaaggcctctggttacatcgatatcaacaacggcatcagctgggtgcgacaggccccaggacacggtcttgagtggatgggatggatcagcatttacagtggtaacacaaagtatgcacagaagttccagggcagagtcaccatgaccacagcgacatccacgagcacagtctacatggagctgaggagcctgacatctgacgacacggccgtgtattactgtgcgagagtgggagtctttaagggcctggctcctttcggggggttcgacccctggggccaggggaccctggtcaccgtctcttcagcctccaccaagggcccatcggtcttccccctggcgccctgctccaggagcacctccgagagcacagcggccctgggctgcctggtcaaggactacttccccgaaccggtgacggtgtcgtggaactcaggcgccctgaccagcggcgtgcacaccttcccggctgtcctacagtcctcaggactctactccctcagcagcgtggtgaccgtgccctccagcagcttgggcacgaagacctacacctgcaatgtagatcacaagcccagcaacaccaaggtggacaagagagtt

SEQ ID NO: 2180 - DNA, 355 bp, Artificial Sequence
  Synthetic polynucleotide encoding artificial human antibody VH chain
ttgttgcagttggtggagtctgggggaggcgtggtccagcctgggaggtccctgagactctcctgtgcagcctctggattcaccttcactcgccatggtttccactgggtccgccaggctccaggcaaggggctggagtgggtggcagttatatcatctgatggaaggaagatacactacacagactcagtgaagggccgattcgtcatctccagagacgattccgacaacacagtgtatctccacatgaacagcctgagacttggggacacggctctgtattactgtgcgagagacagtggtggcactccggggccctactggggccagggaaccctggtcaccgtctcctcag

SEQ ID NO: 2181 - DNA, 667 bp, Artificial Sequence
  Synthetic polynucleotide encoding artificial human antibody VH chain
gtgtgaggtgcaactgttggagtctgggggaggcttggtacagcctggggggtccctgacactctcctgtgtaggctctcgattcacctttagcagctatgccatgaattgggtccgccagagtccagggaggggcctggagtgggtcgcatctatcagtgctactactggtagcacttactacacagactccgtggagggccggttcaccatctccagagacaattccagagacactctatatctgcaaatgaacagcctgagagccgatgacacggccttatattactgtgtgaggtcgttcgtcggcgcagttcccgcttatcccaactttgacttctggggcccggggaccctggtcaccgtctcctcagcctccaccaagggcccatcggtcttccccctggcgccctgctccaggagcacctccgagagcacagcggccctgggctgcctggtcaaggactacttccccgaaccggtgacggtgtcgtggaactcaggcgctctgaccagcggcgtgcacaccttcccggctgtcctacagtcctcaggactctactccctcagcagcgtggtgaccgtgacctccagcaacttcggcacccagacctacacctgcaacgtagatcacaagcccagcaacaccaaggtggacaagacagtg

SEQ ID NO: 2182 - DNA, 677 bp, Artificial Sequence
  Synthetic polynucleotide encoding artificial human antibody VH chain
cacaggtacagctgcagcagtcaggtccgggactggtgaagccctcgcagaccctctcactcacctgtgccatctccggggacggtgtctctagcaacagtgctagttggaactgggtcaggcagtccccatcgagaggccttgagtggctgggaaggacatactacaggtccaagtggtataatgattatgcagtatctgtgaaaagtcgaatgaccatcaaatcagacacatccaagaaccaattctccctgcagttgaactctgtgactcccgaagacacggctgtttattactgtgtaagaggggtagtgggggctactctcgacaactggggccagggaaccctggtcaccgtctcctcagggagtgcatccgccccaacccttttccccctcgtctcctgtgagaattccccgtcggatacgagcagcgtggccgttggctgcctcgcacaggacttccttcccgactccatcactttctcctggaaatacaagaacaactctgacatcagcagcacccggggcttcccatcagtcctgagagggggcaagtacgcagccacctcacaggtgctgctgccttccaaggacgtcatgcagggcacagacgaacacgtggtgtgcaaagtccagcaccccaacggcaacaaagaaaagaacgtgcctcttccg

SEQ ID NO: 2183 - DNA, 666 bp, Artificial Sequence
  Synthetic polynucleotide encoding artificial human antibody VH chain
caggtgcaattggtggaatctgggggaggcgtggtccagcctggggggtccctgagactctcctgtggagcgtctggattcgccttcagtagtaatggcatgcactgggtccgccaggctccaggcaagggactggagtgggtggcttttattcactatgatggaaggaataaacactatacagattccgtgaagggccgattcgccatctccgtagacgattccaagaccacgttgtatctgcaaatgagcagcctgaaaactgaggacacggctgtttattactgtgtgaaagattcccgggttacggggcaaagcagtggttatatctttgactcttggggccagggaaccctggtcaccgtctcctcagcctccaccaagggcccatcggtcttccccctggcgccctgctccaggagcacctccgagagcacagcggccctgggctgcctggtcaaggactacttccccgaaccggtgacggtgtcgtggaactcaggcgctctgaccagcggcgtgcacaccttcccagctgtcctacagtcctcaggactctactccctcagcagcgtggtgaccgtgccctccagcaacttcggcacccagacctacacctgcaacgtagatcacaagcccagcaacaccaaggtggacaagactgag

SEQ ID NO: 2184 - DNA, 648 bp, Artificial Sequence
  Synthetic polynucleotide encoding artificial human antibody VH chain
gtggtgcagctggtggagtctgggggaggcctggtcaagcctggggggtccctgagactctcctgtgcagcctctggaatcaccttcagtagctatgacatgaactgggtccgccaggctccagggaaggggctggagtgggtctcatccattagtagtagtagtagttccatatacttcgcagactcagtgaagggccgattcaccatctccagagacaacgccaagaactcactgtatctgcacatgaacagcctgagagccgaggacacggctgtttattattgtgcgagaccccgtttaggctggtacttcgatctctggggccgtggcaccctagtcactgtcgcctcagcctccaccaagggcccatcggtcttccccctggcaccctcctccaagagcacctctgggggcacagcggccctgggctgcctggtcaaggactacttccccgaaccggtgacggtgtcgtggaactcaggcgccctgaccagcggcgtgcacaccttcccggctgtcctacagtcctcaggactctactccctcagcagcgtggtgaccgtgccctccagcagcttgggcacccagacctacatctgcaacgtgaatcacaagcccagcaacaccaaggtggacaagagagtt

SEQ ID NO: 2185 - DNA, 656 bp, Artificial Sequence
  Synthetic polynucleotide encoding artificial human antibody VH chain
cccaggttcagctggtgcagtctggaggtgaggtgaagaagcctggggcctcagtgaaggtctcctgcaaggcttctggttacaactttaccaactatggtatcagctgggtgcgacaggcccctggccaagggcttgagtggatgggatggatcagcgcttacaatggtaacacgaactatgcacagaagctccagggcagagtcaccatgaccacagacacacccacgagcacagcctacatggagctgaggagcctgagatctgacgacacggccgtgtattactgtgcgagagaaaccgccgggcagctcatcccctttgactactggggccagggaaccctggtcaccgtctcctcagcctccaccaagggcccatcggtcttccccctggcaccctcctccaagagcacctctgggggcacagcggccctgggctgcctggtcaaggactacttccccgaaccggtgacggtgtcgtggaactcaggcgccctgaccagcggcgtgcacaccttcccggctgtcctacagtcctcaggactctactccctcagcagcgtggtgaccgtgccctccagcagcttgggcacccagacctacatctgcaacgtgaatcacaagcccagcaacaccaaggtggacaagagtgag

SEQ ID NO: 2186 - DNA, 666 bp, Artificial Sequence
  Synthetic polynucleotide encoding artificial human antibody VH chain
gtggagcaactggtggagtctgggggaggcttggtacagcctggagggtccctgagactctcctgtgcagcctctggattcagcttcaggagttatgaaatgaactgggtccgccaggctccagggaaggggctggagtgggtttcatacattggtattggtggcaataccatatattatgcagactctgtgaagggccgattcaccatctccagagacaacgccaagaactcactgtatctgcaaatgaacagcctgagagccgaggacacggctgtttattactgtgcgagagattatatgggtgtggatttctactactactacggtatggacgtctggggccaagggaccacggtcaccgtctcctcagcctccaccaagggcccatcggtcttccccctggcaccctcctccaagagcacctctgggggcacagcggccctgggctgcctggtcaaggactacttccccgaaccggtgacggtgtcgtggaactcaggcgccctgaccagcggcgtgcacaccttcccggctgtcctacagtcctcaggactctactccctcagcagcgtggtgaccgtgccctccagcagcttgggcacccagacctacatctgcaacgtgaatcacaagcccagcaacaccaaggtggacaagagagtt

SEQ ID NO: 2187 - DNA, 657 bp, Artificial Sequence
  Synthetic polynucleotide encoding artificial human antibody VH chain
caggtccagcttgtgcagtctggggctgaggtgaagaagcctggggcctcagtgaaggtttcctgcaaggcttctggatacatcttcactagctatgctatacattgggtgcgccaggcccccggacaaaggcttgagtggatgggatggatcaacgctggcaatggtaacacaaagtattcacagaagttccagggcagagtcaccattacccgggacacatccgcgaatacagcctacatggagctgagcagcctgagatctgaagacacggctatatattactgtgcgagagatatagcagtggctattactaactactttggctcctggggccagggaaccctggtcaccgtctcctcagcctccaccaagggcccatcggtcttccccctggcaccctcctccaagagcacctctgggggcacagcggccctgggctgcctggtcaaggactacttccccgaaccggtgacggtgtcgtggaactcaggcgccctgaccagcggcgtgcacaccttcccggctgtcctacagtcctcaggactctactccctcagcagcgtggtgaccgtgccctccagcagcttgggcacccagacctacatctgcaacgtgaatcacaagcccagcaacaccaaggtggacaagaaggtg

SEQ ID NO: 2188 - DNA, 648 bp, Artificial Sequence
  Synthetic polynucleotide encoding artificial human antibody VH chain
caggtgcagctgcaggagtcgggcccaggactggtgaggccctcggagaccctgtccctcacctgcgatgtctctggttacttaatcagtagtggctactactggggctgggtccggcagccccccggaaagggtctggagtggattgggagcgtctatcatagtgggaatgcctactacaatccgtccctcaagggtcgagtcacaatgtcagtagatacgtcgaaaaatcagttctccctgaagttgacctctgtggccgccgaagacacggccgtctattattgtgcgagagaacatcgtagtgggtatcagcgatactggggccagggaaccctggtcaccgtctcctcagcctccaccaagggcccatcggtcttccccctggcaccctcctccaagagcacctctgggggcacagcggccctgggctgcctggtcaaggactacttccccgaaccggtgacggtgtcgtggaactcaggcgccctgaccagcggcgtgcacaccttcccggctgtcctacagtcctcaggactctactccctcagcagcgtggtgaccgtgccctccagcagcttgggcacccagacctacatctgcaacgtgaatcacaagcccagcaacaccaaggtggacaagaaagtg

SEQ ID NO: 2189 - DNA, 671 bp, Artificial Sequence
  Synthetic polynucleotide encoding artificial human antibody VH chain
cccagatcaccttgaaggagtctggtcctacgctggtgaaacccacacagaccctcacgctgacctgcaccttctctgggttctcactcaacactagtggagtgggtgtgggctggatccgtcagcccccgggaaaggccctggagtggcttgcactcatttattgggatgatgatgagcgctacaggccatctctgaagaacagactcaccatcaccagggacacctccaaaaaccaggtggtccttacgatgaccaacatggaccctgtggacacagccacatattactgtgcacacttctctacggtgattaactttggccactggggccagggaaccctggtcaccgtctcctcagggagtgcatccgccccaacccttttccccctcgtctcctgtgagaattccccgtcggatacgagcagcgtggccgttggctgcctcgcacaggacttccttcccgactccatcactttctcctggaaatacaagaacaactctgacatcagcagcacccggggcttcccatcagtcctgagagggggcaagtacgcagccacctcacaggtgctgctgccttccaaggacgtcatgcagggcacagacgaacacgtggtgtgcaaagtccagcaccccaacggcaacaaagaaaagaacgtgcctcttcca

SEQ ID NO: 2190 - DNA, 346 bp, Artificial Sequence
  Synthetic polynucleotide encoding artificial human antibody VH chain
gaggtgcagctggtggagtctgggggaggcctggtcaagccgggggggtccctcagactgtcctgtgtcggctctggattcaccttcagcaactatagcatgaactgggtccgccaggctccagggagggggcttgagtgggtctcttcaattagttggggtagttcttacataaactacgcagactcagtgaagggccgattcaccatctccagagacaacgccaagaactcactatatctgcagatgaccagcctgaccgccgaggacacggctgtctattactgtgcgtgccgacggatatatcaggggttcgacccctggggccagggaaccctggtcaccg

SEQ ID NO: 2191 - DNA, 645 bp, Artificial Sequence
  Synthetic polynucleotide encoding artificial human antibody VH chain
gaggtgcagctggtggagtctgggggaggcctggtcaagcctggggggtccctgagactctcctgtgcagcctctggattcaccttcagtagctatagcatgaactgggtccgccaggctccagggaaggggctggagtgggtctcatcgattagtagcagtagtaggtacatatactacgcagactcagtgaagggccgattcaccagctccagagacaacgccaagaactcactgtatctgcaaatgaacagcctgagagccgaggacacggctgtgtattactgtgcgagagatcgagctacctcgtttgattactggggccagggaaccctggtcaccgtctcctcagcctccaccaagggcccatcggtcttccccctggcaccctcctccaagagcacctctgggggcacagcggccctgggctgcctggtcaaggactacttccccgaaccggtgacggtgtcgtggaactcaggcgccctgaccagcggcgtgcacaccttcccggctgtcctacagtcctcaggactctactccctcagcagcgtggtgaccgtgccctccagcagcttgggcacccagacctacatctgcaacgtgaatcacaagcccagcaacaccaaggtggacaagaaggtg

SEQ ID NO: 2192 - DNA, 639 bp, Artificial Sequence
  Synthetic polynucleotide encoding artificial human antibody VH chain
ccggtgcttctgcaggagtcgggcccaggactggtgaagccttcggagaccctgtccctcacctgcactgtctctggtgactccatgagtttttactattggacctggatccggcagcccccagggaagggactggaatggattggatatatctattacagtgggaacaggaactacaatccctccctcaacagtcgagtcaccatatctgtagacacgtccaagaacgaggtctccctgaagctgacgtctgtgacagctgcggacacggccgcgtattactgtgcgagaggtcggggggaaatggacgtctggggccaagggaccacggtcaccgtctcctcagcctccaccaagggcccatcggtcttccccctggcaccctcctccaagagcacctctgggggcacagcggccctgggctgcctggtcaaggactacttccccgaaccggtgacggtgtcgtggaactcaggcgccctgaccagcggcgtgcacaccttcccggctgtcctacagtcctcaggactctactccctcagcagcgtggtgaccgtgccctccagcagcttgggcacccagacctacatctgcaacgtgaatcacaagcccagcaacaccaaggtggacaagagagtt

SEQ ID NO: 2193 - DNA, 660 bp, Artificial Sequence
  Synthetic polynucleotide encoding artificial human antibody VH chain
caggtgcagctgcaggagtcgggcccaggactggtgaagcccacacagaccctgtccctcacctgcactgtctctggtggctccatcagcagtggtagttactactggaactggatccggcagcccgccgggaagggactggagtggattgggaacatctataccagtgggaataccgactacaacccctccctcaagagtcgagtcaccatatctctagacacgtccaagaaccaggtctccctgaatttgacttctgtgaccgccgcagacacggccgtgtattactgtgcgactacccctagcagcagctggtactggtacttcgacccctggggccagggaaccctggtcaccgtctcctcagcctccaccaagggcccatcggtcttccccctggcaccctcctccaagagcacctctgggggcacagcggccctgggctgcctggtcaaggactacttccccgaaccggtgacggtgtcgtggaactcaggcgccctgaccagcggcgtgcacaccttcccggctgtcctacagtcctcaggactctactccctcagcagcgtggtgaccgtgccctccagcagcttgggcacccagacctacatctgcaacgtgaatcacaagcccagcaacaccaaggtggacaagagtgag

SEQ ID NO: 2194 - DNA, 663 bp, Artificial Sequence
  Synthetic polynucleotide encoding artificial human antibody VH chain
gaggtgcagttggtggagtctgggggaggcctggtcaagccgggggggtccctgagactctcctgtgcaggctctggatttagtttcagtagttatagcatgaactgggtccggcaggctccagggaaggggctggagtgggtctcatccattagtagtaaaagtagttccaaaaactacatagactctgtgaagaaccgattcatcatctccagagacaacgccaagaactcgctgtatctgcagatgaacagcctgagagccgaggacacggctgtgtattactgtgcgagagatcttgaacttattattgcagcaggtgctccccttgaccactggggccagggaaccctggtcaccgtctcctcagcctccaccaagggcccatcggtcttccccctggcaccctcctccaagagcacctctgggggcacagcggccctgggctgcctggtcaaggactacttccccgaaccggtgacggtgtcgtggaactcaggcgccctgaccagcggcgtgcacaccttcccggctgtcctacagtcctcaggactctactccctcagcagcgtggtgaccgtgccctccagcagcttgggcacccagacctacatctgcaacgtgaatcacaagcccagcaacaccaaggtggacaagagagag

SEQ ID NO: 2195 - DNA, 666 bp, Artificial Sequence
  Synthetic polynucleotide encoding artificial human antibody VH chain
cccctgcagctgcaggagtcgggcccaggactggtgaagccttcggagaccctgtccctcacctgcactgtctctggtggctccatcagcagaagtccttacttctggggctggatccgccagcccccagggaggggcctggagtggatcgcgagtatctattatagagggaccacctcttacaacccgtccctcaagagtcgagtgaccatctcagtagacacgtctaagaaccagttctccctgaaactgaggtctgtgaccgccgcggacacggccgtgttttattgtgcgagactggtaacatcacctgaagaagggggtccctggttcgacccctggggccggggaaccctggtcaccgtctcctcagcctccaccaagggcccatcggtcttccccctggcaccctcctccaagagcacctctgggggcacagcggccctgggctgcctggtcaaggactacttccccgaaccggtgacggtgtcgtggaactcaggcgccctgaccagcggcgtgcacaccttcccggctgtcctacagtcctcaggactctactccctcagcagcgtggtgaccgtgccctccagcagcttgggcacccagacctacatctgcaacgtgaatcacaagcccagcaacaccaaggtggacaagaaagtg

SEQ ID NO: 2196 - DNA, 358 bp, Artificial Sequence
  Synthetic polynucleotide encoding artificial human antibody VH chain
caggtgcagctggtggagtctgggggaggcgtggtccagcctgggaggtccctgagactctcctgtgcagcgtctggattcaccttcactagttatggcatgcactgggtccgccaggctcctggcaaggggctggagtgggtggcacttatctggtatgatggaagtaataaatactatgcagactccgtgaagggccgattcaccatctccagagacaattccaagaacacgctgtatctacaaatgaacagcctgagagccgaggacacggctgtgtattactgtgcgagagatacggaagtggggcatcactttgactactggggccagggaaccctgatcaccgtctcctcag

SEQ ID NO: 2197 - DNA, 659 bp, Artificial Sequence
  Synthetic polynucleotide encoding artificial human antibody VH chain
cccaggtgcagctgcaggagtcgggcccaggactggtgaagccttcggagaccctgtccctcacctgcactgtctctagtggctccagtggtagttattacttgagctggatccggcagcccgccgggaagggactggagtggatcgggcgtatgtacaccagtgggagcacccactacaacccctccctcaagagtcgagtcaccatgtcagtagacacgtccaagaaccagttctccctgaagttgagttctgtgacggccgcggacacggccgtctattactgtgcgaagccctggagaagtgatggttttgatgtctggggccaagggacggtggtcaccgtctcttcagcatccccgaccagccccaaggtcttcccgctgagcctctgcagcacccagccagatgggaacgtggtcatcgcctgcctggtccagggcttcttcccccaggagccactcagtgtgacctggagcgaaagcggacagggcgtgaccgccagaaacttcccacccagccaggatgcctccggggacctgtacaccacgagcagccagctgaccctgccggccacacagtgcctagccggcaagtccgtgacatgccacgtgaagcactacacgaatcccagccaggatgtgactgtgccctgccct

SEQ ID NO: 2198 - DNA, 650 bp, Artificial Sequence
  Synthetic polynucleotide encoding artificial human antibody VH chain
cccaggtgcagctggtgcagtctggggctgaggtgaagaagcctggggcctcagtgaaggtctcctgcaaggcttctggatacaacttcagggactactatatgcactgggtgcggcaggcccctggacaaggccttgagtggatgggatggatcaaccctaatagtggtggcacaatctctgcacagaactttcagggccgggtcaccatgaccagggacacctccatcagcacagcctacatggaggtaaacagcctgagatctgacgacacggccgtatattattgtgcagtgggcatggttacagatggttttgaaatctggggccaagggacattggtcaccgtctcttcagcctccaccaagggcccatcggtcttccccctggcaccctcctccaagagcacctctgggggcacagcggccctgggctgcctggtcaaggactacttccccgaaccggtgacggtgtcgtggaactcaggcgccctgaccagcggcgtgcacaccttcccggctgtcctacagtcctcaggactctactccctcagcagcgtggtgaccgtgccctccagcagcttgggcacccagacctacatctgcaacgtgaatcacaagcccagcaacaccaaggtggacaagagagtt

SEQ ID NO: 2199 - DNA, 668 bp, Artificial Sequence
  Synthetic polynucleotide encoding artificial human antibody VH chain
cccaggtgcagctgcaggagtcgggctcaggactggtgaggccttcacagaccctgtccctcacctgcactgtctctggtggctccatcaacagtggtgattaccactggagttggatccgccagccccccgggaaggacctggagtatattggatatatccatcacactgggagcgcctactacaacccgtccctcaagagtcgagttaccatatcagtagacacgtccaagaaccaacactctctgaggctgacttctgtgactgccgcagacacggccgtgtattattgtgccaggctggatttgcggaccgtgaggttcgacccctggggccaggggaccctggtcaccgtctcctcagcatccccgaccagccccaaggtcttcccgctgagcctctgcagcacccagccagatgggaacgtggtcatcgcctgcctggtccagggcttcttcccccaggagccactcagtgtgacctggagcgaaagcggacagggcgtgaccgccagaaacttcccacccagccaggatgcctccggggacctgtacaccacgagcagccagctgaccctgccggccacacagtgcctagccggcaagtccgtgacatgccacgtgaagcactacacgaatcccagccaggatgtgactgtgccctgccca

SEQ ID NO: 2200 - DNA, 678 bp, Artificial Sequence
  Synthetic polynucleotide encoding artificial human antibody VH chain
cccctgcagctgcaggagtcgggcccaggactggcgaagccttcggagaccctgtccctcacctgcactgcctctggtggctccatcagcagtagtggttactactggggctggatccgccagcccccagggaaggggctggagtggattgggagtatctattatagtggggacacctactacaacccgtccctgaagagtcgagtcaacatagccgtagacacgtcccagaaccagttctccctgaagttgaactctgtgaccgccgctgatacggctgtatattactgtgcgagacatagcagtggccccccccggctcgcttttgatatctggggccaagggacaatggtcaccgtctcttcagggagtgcatccgccccaacccttttccccctcgtctcctgtgagaattccccgtcggatacgagcagcgtggccgttggctgcctcgcacaggacttccttcccgactccatcactttctcctggaaatacaagaacaactctgacatcagcagcacccggggcttcccatcagtcctgagagggggcaagtacgcagccacctcacaggtgctgctgccttccaaggacgtcatgcagggcacagacgaacacgtggtgtgcaaagtccagcaccccaacggcaacaaagaaaagaacgtgcctcttccg

SEQ ID NO: 2201 - DNA, 654 bp, Artificial Sequence
  Synthetic polynucleotide encoding artificial human antibody VH chain
caggtgcagctggtggagtctgggggaggcgtggtccagcctgggaggtccctgagactctcctgtgcagcctctggattcaccttcagtagctatggcatgcactgggtccgccaggttccaggcaaggggctggagggggtggcagttatatcacatgatggaagtaataaatattatgcagactccgtgaagggccgattcaccatctccagagacaattccaagaatacgctgtacctgcaaatgaacagcctgagagttgaggacacggctgtgtattattgtgcgaaagatttcgctatgcctacagtaactacggactactggggccagggaaccctggtcaccgtctcctcagcctccaccaagggcccatcggtcttccccctggcaccctcctccaagagcacctctgggggcacagcggccctgggctgcctggtcaaggactacttccccgaaccggtgacggtgtcgtggaactcaggcgccctgaccagcggcgtgcacaccttcccggctgtcctacagtcctcaggactctactccctcagcagcgtggtgaccgtgccctccagcagcttgggcacccagacctacatctgcaacgtgaatcacaagcccagcaacaccaaggtggacaagaatgag

SEQ ID NO: 2202 - DNA, 364 bp, Artificial Sequence
  Synthetic polynucleotide encoding artificial human antibody VH chain
cagatcaccttgaaggagtctggtcctacgctggtgaaacccacacagaccctcacgctgacctgcaccttctctgggttctcactcaccactagtggagtgggtgtgggctggatccgtcagcccccaggaaaggccctggagtggcttgcactcatttattgggatgatgataagcgctacagtccatctctgaggagtagactcaccatcaccaaggacacctccaaaaaccaggtggtccttacaatgaccaacatggaccctgtggacacagccacatattattgtgtacacagaccatccctggcctattggtacttcgatgtctggggccgtggcaccctgctcactgtctcctcag

SEQ ID NO: 2203 - DNA, 657 bp, Artificial Sequence
  Synthetic polynucleotide encoding artificial human antibody VH chain
gtggtacagttggtggagtctgggggaggcttggtccagcctggagggtccctgagactctcctgtgcagcctctggattcaccttcagtacatatgaactaaactgggtccggcaggctccagggaaggggctggagtggatttcatacattaatactactagtgatcccatatactacgcagactctgtgaagggccgattcaccatctccagagacaacgccaagaattcagtgtttctgcaaatgaacagcctgagagccgaggacacggctgtttactactgcgtgagagagggtgattcacggaaatattatagtcttgactattggggccagggaaccctggtcaccgtctcctcagcctccaccaagggcccatcggtcttccccctggcaccctcctccaagagcacctctgggggcacagcggccctgggctgcctggtcaaggactacttccccgaaccggtgacggtgtcgtggaactcaggcgccctgaccagcggcgtgcacaccttcccggctgtcctacagtcctcaggactctactccctcagcagcgtggtgaccgtgccctccagcagcttgggcacccagacctacatctgcaacgtgaatcacaagcccagcaacaccaaggtggacaagagagtt

SEQ ID NO: 2204 - DNA, 654 bp, Artificial Sequence
  Synthetic polynucleotide encoding artificial human antibody VH chain
ccggtgcagctggtgcagtctggggctgaggtgaagaagcctgggtcctcggtgaaggtctcctgcaaggcttctggaggcaccttcagcagctatgctatcagctgggtgcgacaggcccctggacaagggcttgagtggatgggagggatcatccctatctttggtacagcaaactacgcacagaagttccagggcagagtcacgattaccgcggacgaatccacgagcacagcctacatggagctgagcagcctgagatctgaggacacggccgtgtattactgtgcgagagatccaatgtgggtctcttatgcttttgatatctggggccaagggacaatggtcaccgtctcttcagcctccaccaagggcccatcggtcttccccctggcaccctcctccaagagcacctctgggggcacagcggccctgggctgcctggtcaaggactacttccccgaaccggtgacggtgtcgtggaactcaggcgccctgaccagcggcgtgcacaccttcccggctgtcctacagtcctcaggactctactccctcagcagcgtggtgaccgtgccctccagcagcttgggcacccagacctacatctgcaacgtgaatcacaagcccagcaacaccaaggtggacaagaatgag

SEQ ID NO: 2205 - DNA, 645 bp, Artificial Sequence
  Synthetic polynucleotide encoding artificial human antibody VH chain
cccgtgcagctgcaggagtcgggcccaggactggtgaagccttcggagaccctgtccctcacctgcactgtctctggtggctccatcagcagtgataattactactggagctggctccgccagcacccagggaagggcctggagtggattgggtacatctatttcagtgtgaccacctactacaacccgtccctcaagagtcgagttaccatatcactagacacgtctaagaaccagttctccctgaagctgagctctgtgactgccgcggacacggccgtgtattactgtgcgagtggttatgtttctttcgatctctggggccagggaaccctggtcaccgtctcctcagcctccaccaagggcccatcggtcttccccctggcaccctcctccaagagcacctctgggggcacagcggccctgggctgcctggtcaaggactacttccccgaaccggtgacggtgtcgtggaactcaggcgccctgaccagcggcgtgcacaccttcccggctgtcctacagtcctcaggactctactccctcagcagcgtggtgaccgtgccctccagcagcttgggcacccagacctacatctgcaacgtgaatcacaagcccagcaacaccaaggtggacaagagagtt

SEQ ID NO: 2206 - DNA, 662 bp, Artificial Sequence
  Synthetic polynucleotide encoding artificial human antibody VH chain
cccaggtgcagctgcaggagtcgggcccaggactggtgaagccttcggagaccctgtccctcacctgcaatgtctctggtgcctccatcagtagttactactggagttggatccggcagcccccagggaagggactggagtggattggttatctctcttacagtgggaacaccaactccaaaccctccctcaagagtcgagtcaccatatcagtagacacgtccaagaaccagttctccctgaaactgagctctgtgaccgctgcggacacggccgtgtattactgtgcgagagagggggcctatgagagtagtggacctgatccttttgatatctggggccaagggacaatggtcaccgtctcttcagcctccaccaagggcccatcggtcttccccctggcaccctcctccaagagcacctctgggggcacagcggccctgggctgcctggtcaaggactacttccccgaaccggtgacggtgtcgtggaactcaggcgccctgaccagcggcgtgcacaccttcccggctgtcctacagtcctcaggactctactccctcagcagcgtggtgaccgtgccctccagcagcttgggcacccagacctacatctgcaacgtgaatcacaagcccagcaacaccaaggtggacaagagagtt

SEQ ID NO: 2207 - DNA, 662 bp, Artificial Sequence
  Synthetic polynucleotide encoding artificial human antibody VH chain
cccaggtccaggttgtgcagtctggggctgaggtgaagaagcctggggcctcagtgaagatttcctgcaaggcttctggaaacaccttcactacctatactatacagtgggtgcgccaggtccccggacaaaggcttgagtggatgggatggatcaacgctggcaatggtgacataaaatattcacagaagttccaagacagagtcaccattaccagggacacatccgcgaacacagcctacatggagctgagcagcctgagatatgaagacacggctgtatatttctgtgcgagcctctttctaacatactatggttcggggacttattatcgctggggccagggaaccctggtcaccgtctcctcagcctccaccaagggcccatcggtcttccccctggcaccctcctccaagagcacctctgggggcacagcggccctgggctgcctggtcaaggactacttccccgaaccggtgacggtgtcgtggaactcaggcgccctgaccagcggcgtgcacaccttcccggctgtcctacagtcctcaggactctactccctcagcagcgtggtgaccgtgccctccagcagcttgggcacccagacctacatctgcaacgtgaatcacaagcccagcaacaccaaggtggacaagagtgag

SEQ ID NO: 2208 - DNA, 648 bp, Artificial Sequence
  Synthetic polynucleotide encoding artificial human antibody VH chain
gaggtgcagctgttggagtctgggggaggcttggtacagcctggggggtccctgagactctcctgtgcagcctctggattcacctttagcagctatgccatgagctgggtccgccaggctccagggaaggggctggagtgggtctcaactattagtggtagtggtcatagcacatactacgcagactccgtgaagggccggttcaccatctccagagacaattccaagaacacgctgtatctgcaaatgaacagcctgagagccgaggacacggccgtatattactgtgcgaaatcgaccctcggtggtggttttgacttctggggccagggaaccctggtcaccgtctcctcagcctccaccaagggcccatcggtcttccccctggcaccctcctccaagagcacctctgggggcacagcagccctgggctgcctggtcaaggactacttccccgaaccggtgacggtgtcgtggaactcaggcgccctgaccagcggcgtgcacaccttcccggctgtcctacagtcctcaggactctactccctcagcagcgtggtgaccgtgccctccagcagcttgggcacccagacctacatctgcaacgtgaatcacaagcccagcaacaccaaggtggacaagaaagtt

SEQ ID NO: 2209 - DNA, 669 bp, Artificial Sequence
  Synthetic polynucleotide encoding artificial human antibody VH chain
gtggtgcagctggtggagtctgggggaggtgtggtacggcctggggggtccctgagactctcctgtgcagcctctggattcacctttgatgattatggcatgagctgggtccgccaagctccagggaaggggctggagtgggtctctggtattaattggaatggtggtagcacaggttatgcagactctgtgaagggccgattcaccatctccagagacaacgccaagaactccctgtatctgcaaatgaacagtctgagagccgaggacacggccttgtatcactgtgcgagagttggtagcagcagctggtacagctccgggcgatccccttttgactactggggccagggaaccctggtcaccgtctcctcagcctccaccaagggcccatcggtcttccccctggcaccctcctccaagagcacctctgggggcacagcggccctgggctgcctggtcaaggactacttccccgaaccggtgacggtgtcgtggaactcaggcgccctgaccagcggcgtgcacaccttcccggctgtcctacagtcctcaggactctactccctcagcagcgtggtgaccgtgccctccagcagcttgggcacccagacctacatctgcaacgtgaatcacaagcccagcaacaccaaggtggacaagagagtt

SEQ ID NO: 2210 - DNA, 663 bp, Artificial Sequence
  Synthetic polynucleotide encoding artificial human antibody VH chain
caggtgcagctggtggagtctgggggaggcgtggtccagcctgggaggtccctgagactctcctgtgcagcctctggattcaccttcagtagctatggcatgcactgggtccgccaggctccaggcaaggggctggagtgggtggcagttatatcatatgatggaagtaataaatactatgcagactccgtgaagggccgattcaccatctccagagacaattccaagaacacgctgtatctgcaaatgaacagcctgagagctgaggacacggctgtgtattactgtgcgaaagatcaaatcgtcctagagatggctacaagcccctttgactactggggccagggaaccctggtcaccgtctcctcagcctccaccaagggcccatcggtcttccccctggcgccctgctccaggagcacctccgagagcacagcggccctgggctgcctggtcaaggactacttccccgaaccggtgacggtgtcgtggaactcaggcgctctgaccagcggcgtgcacaccttcccagctgtcctacagtcctcaggactctactccctcagcagcgtggtgaccgtgccctccagcaacttcggcacccagacctacacctgcaacgtagatcacaagcccagcaacaccaaggtggacaagacagtg

SEQ ID NO: 2211 - DNA, 671 bp, Artificial Sequence
  Synthetic polynucleotide encoding artificial human antibody VH chain
cccaggtgcagctgcaggagtcgggcccaggactggtgaagccttcacagaccctgtccctcacctgcactgtctctggtggctccatcagcagtggtggttactactggagctggatccgccagcacccagggaagggcctggagtggattgggtacatctattacagtgggagcacctactacaacccgtccctcaagagtcgagttaccatatcagtagacacgtctaagaaccagttctccctgaagctgagctctgtgactgccgcggacacggccgtgtattactgtgcgagagatctcagttgtagtagtaccagctgccatgatgcttttgatatctggggccaagggacaatggtcaccgtctcttcagcctccaccaagggcccatcggtcttccccctggcaccctcctccaagagcacctctgggggcacagcggccctgggctgcctggtcaaggactacttccccgaaccggtgacggtgtcgtggaactcaggcgccctgaccagcggcgtgcacaccttcccggctgtcctacagtcctcaggactctactccctcagcagcgtggtgaccgtgccctccagcagcttgggcacccagacctacatctgcaacgtgaatcacaagcccagcaacaccaaggtggacaagagtgag

SEQ ID NO: 2212 - DNA, 370 bp, Artificial Sequence
  Synthetic polynucleotide encoding artificial human antibody VH chain
caggtgcagctggtgcagtctggggctgaggtgaagaagcctggggcctcagtgaaggtctcctgcaaggcttctggatacaccttcaccggctactatttacactgggtgcgacaggcccctggacaagggcttgagtggatgggacggatcaaccctaacagtggtggcacaaactatgcacagaactttcagggcagggtcaccatgaccagggacacgtccatcagcacagcctacatggagctgagcagtctaaaatctgacgacacggccgtgtttttttgtgcgagaggacccaatttccatgagagtatacgtgatggctttgatatctggggccaagggacaatggtcaccgtctcttcag

SEQ ID NO: 2213 - DNA, 355 bp, Artificial Sequence
  Synthetic polynucleotide encoding artificial human antibody VH chain
gaggtgcagctggtggagtctgggggaggcttggtacagcctggggggtccctgagactctcctgtgcagcctctggattcaccttcagtagctacgactttcactgggtccgccaacctacagggaaaggtctggagtgggtctcagctattggtactgctggtgacacactctatctagactccgtgaagggccgattcaccatctccagagaaaatgccaagaactccttgtatcttcaaatgaacagcctgagagccggggacacggctgtctattactgtgcaagagttaactggaattccgatacctttgactcctggggccagggaaccctggtcaccgtctcctcag

SEQ ID NO: 2214 - DNA, 687 bp, Artificial Sequence
  Synthetic polynucleotide encoding artificial human antibody VH chain
caggtgcagctggtggagtctgggggaggcgtggtccagcctgggaggtccctgagactctcctgtgcagcctctggattcaccttcaggagttatggcatgcactgggcccgccaggctccaggcagggggctggagtgggtggcagttatatcatatgatggaagtaatagttactatgcagactccgtgaagggccgattcaccatctccagagacaattccaagaacacgctgtatctagaaatgaacagcctgagagctgacgacacggctgtctattactgtgcgagagatccggggagagatccgtatttggacttggactatcactacggcatggacgtctggggccaagggaccacggtcaccgtctcctcagcatccccgaccagccccaaggtcttcccgctgagcctctgcagcacccagccagatgggaacgtggtcatcgcctgcctggtccagggcttcttcccccaggagccactcagtgtgacctggagcgaaagcggacagggcgtgaccgccagaaacttcccacccagccaggatgcctccggggacctgtacaccacgagcagccagctgaccctgccggccacacagtgcctagccggcaagtccgtgacatgccacgtgaagcactacacgaatcccagccaggatgtgactgtgccctgcccg

SEQ ID NO: 2215 - DNA, 663 bp, Artificial Sequence
  Synthetic polynucleotide encoding artificial human antibody VH chain
caggtgcagttggtggaatctgggggaggcttggtcgagcctggagggtccctgagactctcctgtgcagcctctggattcaccttcagtgactactacatgagctggatccgccaggctccagggaagcggctggagtggatttcacacatgagtagtggcggtaatcgcagacactacgcagactctgtgaggggccgattcaccatttccagagacaacgccaagaactcactgtatctgcaaatgaacagcatgagagccgacgacacggctgtgtattattgtgcgagagataagaggagcggtatgacttccgacagacgaattgactactggggccagggcacccgggtcaccgtctcctcagcctccaccaagggcccatcggtcttccccctggcaccctcctccaagagcacctctgggggcacagcggccctgggctgcctggtcaaggactacttccccgaaccggtgacggtgtcgtggaactcaggcgccctgaccagcggcgtgcacaccttcccggctgtcctacagtcctcaggactctactccctcagcagcgtggtgaccgtgccctccagcagcttgggcacccagacctacatctgcaacgtgaatcacaagcccagcaacaccaaggtggacaagagagtt

SEQ ID NO: 2216 - DNA, 651 bp, Artificial Sequence
  Synthetic polynucleotide encoding artificial human antibody VH chain
gtggtgcaactgggggagtctgggggaggcctggtcaagccgggggggtccctgagactctcctgtgcagcctctggattcaccttcagtagttatcacatgaactgggtccgccagtctccagagaaggggctggagtgggtctcatacattagtagtagtggtacttacatagactatgcagactcagtgaggggccgattcaccatctccagagacaacgccaagaactcactgtatctgcaaatgaacatcctgagacccgacgacacggctgtttattactgttcggggggctattactcctcctcccacatggacgtctggggcaaagggaccacggtcaccgtctcctcagcctccaccaagggcccatcggtcttccccctggcaccctcctccaagagcacctctgggggcacagcggccctgggctgcctggtcaaggactacttccccgaaccggtgacggtgtcgtggaactcaggcgccctgaccagcggcgtgcacaccttcccggctgtcctacagtcctcaggactctactccctcagcagcgtggtgaccgtgccctccagcagcttgggcacccagacctacatctgcaacgtgaatcacaagcccagcaacaccaaggtggacaagagagtt

SEQ ID NO: 2217 - DNA, 654 bp, Artificial Sequence
  Synthetic polynucleotide encoding artificial human antibody VH chain
caggtgcagctggtggagtctgggggaggcgtggtccagcctgggaggtccctgagactctcctgtgcagcctctggattcaccttcagtagctatgctatgcactgggtccgccaggctccaggcaaggggctggagtgggtggcagtgatatcatatgatggaagcaataaatactacgcagactccttgaagggccgattcaccatctccagagacaattccaaggacacgctgtatctgcaagtgaacagcctgagacctgaggacacggctgtgtattactgtgcgagagtgaatatagcagcagctggtactcttgactactggggccagggaaccctggtcaccgtctcctcagcctccaccaagggcccatcggtcttccccctggcaccctcctccaagagcacctctgggggcacagcggccctgggctgcctggtcaaggactacttccccgaaccggtgacggtgtcgtggaactcaggcgccctgaccagcggcgtgcacaccttcccggctgtcctacagtcctcaggactctactccctcagcagcgtggtgaccgtgccctccagcagcttgggcacccagacctacatctgcaacgtgaatcacaagcccagcaacaccaaggtggacaagaatgag

SEQ ID NO: 2218 - DNA, 678 bp, Artificial Sequence
  Synthetic polynucleotide encoding artificial human antibody VH chain
gaagtgcagctggtggaatctgggggaggcttggtagagcctggcaggtccctgagactctcctgtgcagcctctggattcacccttgaagagtttgccatgcactgggtccggcaagttccagggaagggcctggagtgggtctcagctatcagttggaatagtggttcgatagcctatgcggactctgtgaagggccgatttaccatctccagagacaacgccaagaactccctctatctgcaaatggacagtctgagagctgaggacacggccttgtattactgtgtaaaagatatggggcctgctggaactgcttcggcttatcactaccacaatggaatggacgtctggggccaagggaccacggtcaccgtctcctcagcctccaccaagggcccatcggtcttccccctggcaccctcctccaagagcacctctgggggcacagcggccctgggctgcctggtcaaggactacttccccgaaccggtgacggtgtcgtggaactcaggcgccctgaccagcggcgtgcacaccttcccggctgtcctacagtcctcaggactctactccctcagcagcgtggtgaccgtgccctccagcagcttgggcacccagacctacatctgcaacgtgaatcacaagcccagcaacaccaaggtggacaagagagag

SEQ ID NO: 2219 - DNA, 650 bp, Artificial Sequence
  Synthetic polynucleotide encoding artificial human antibody VH chain
cccaggtgcagctgcaggagtcgggcccaggactggtgaagccttcggagaccctgtccctcacctgcactgtctctggtggctccatcagtgattactactggagctggatccggcagcccccagggaaggaactagagtggattgggtatatctattatagtgggagcaccaactacaacccctccctcaagagtcgagtcaccatctcagtagacacgtccaagaaccagttctccctgaaactgagctctgtgaccgccgcagacacggccgtatactactgtgcgagactaactactagtaccagcgcgctgagctactggggccagggaaccctggtcaccgtctcctcagcctccaccaagggcccatcggtcttccccctggcaccctcctccaagagcacctctgggggcacagcggccctgggctgcctggtcaaggactacttccccgaaccggtgacggtgtcgtggaactcaggcgccctgaccagcggcgtgcacaccttcccggctgtcctacagtcctcaggactctactccctcagcagcgtggtgaccgtgccctccagcagcttgggcacccagacctacatctgcaacgtgaatcacaagcccagcaacaccaaggtggacaagagtgag

SEQ ID NO: 2220 - DNA, 663 bp, Artificial Sequence
  Synthetic polynucleotide encoding artificial human antibody VH chain
cccgtgcagctggtgcagtctggggctgaggtgaagaagcctgggtcctcggtgaaggtctcctgcaaggcttctggaggcaccttcagcagctatgctatcagctgggtgcgacaggcccctggacaagggcttgagtggatgggagggatcatccctatctttggtacagcaaactacgcacagaagttccagggcagagtcacgattaccgcggacgaatccacgagcacagcctacatggagctgagcagcctgagatctgaggacacggccgtgtattactgtgcgagagagaactggaactccgctggaactacggagtggttcgacccctggggccagggaaccctggtcaccgtctcctcagcctccaccaagggcccatcggtcttccccctggcaccctcctccaagagcacctctgggggcacagcggccctgggctgcctggtcaaggactacttccccgaaccggtgacggtgtcgtggaactcaggcgccctgaccagcggcgtgcacaccttcccggctgtcctacagtcctcaggactctactccctcagcagcgtggtgaccgtgccctccagcagcttgggcacccagacctacatctgcaacgtgaatcacaagcccagcaacaccaaggtggacaagagagtt

SEQ ID NO: 2221 - DNA, 354 bp, Artificial Sequence
  Synthetic polynucleotide encoding artificial human antibody VH chain
cccaggttcagctggtgcagtctggagctgaggtgaagaagcctggggcctcagtgaaggtctcctgcaaggcttctggttacacctttagcagctacggtatcagctgggtgcgacaggcccctggacaggggcttgagtggatgggatggatcaacggttacaatggtaacacaaactatgcacagaagctccagggcagagtcaccatgaccacagacacatccacgagcacagcctacatggacctgaggagcctgagatctgacgacacggccgtgtattactgtgcgagagatactctacaaaagggggactactggggccagggaaccctggtcaccgtctcctccg

SEQ ID NO: 2222 - DNA, 672 bp, Artificial Sequence
  Synthetic polynucleotide encoding artificial human antibody VH chain
gtggtgcagctggtggagtctgggggaggcttggtacagcctggagggtccctgagactctcctgtgcagcctctggattcaccttccggagttatgaaatgaactgggtccgccaggctccagggaaggggctggagtgggtttcatacattactagtagtggtgataccatataccacgcagactctgtgaagggccgattcaccatctccagagacaacactaagaactcactatatctgcaaatgaccggcctgagaaccgaggacacggctgtttattactgtgcgagagcctcccgcgttctagaaagtaagagctggcacggggatgcttttgatgtctggggccgagggacaagggtcatcgtctcttcagcctccaccaagggcccatcggtcttccccctggcaccctcctccaagagcacctctgggggcacagcggccctgggctgcctggtcaaggactacttccccgaaccggtgacggtgtcgtggaactcaggcgccctgaccagcggcgtgcacaccttcccggctgtcctacagtcctcaggactctactccctcagcagcgtggtgaccgtgccctccagcagcttgggcacccagacctacatctgcaacgtgaatcacaagcccagcaacaccaaggtggacaagaaagtg

SEQ ID NO: 2223 - DNA, 654 bp, Artificial Sequence
  Synthetic polynucleotide encoding artificial human antibody VH chain
caggtgcagctggtgcagtctggggctgaggtgaagaagcctgggtcctcggtgaaggtctcctgcaaggcttctggaggcaccttcagcagctatgctatcagctgggtgcgacaggcccctggacaagggcttgagtggatgggagggatcatccctatctttggtacaacaaactacgcacagaagttccagggcagagtcacgattaccgcggacgaatccacgagcacagcctacatggagctgagcagcctgagatctgaggacacggccgtgtattactgtgcgaggggtcttggcggtagtggttattattttgactactggggccagggaaccctggtcaccgtctcctcagcctccaccaagggcccatcggtcttccccctggcaccctcctccaagagcacctctgggggcacagcggccctgggctgcctggtcaaggactacttccccgaaccggtgacggtgtcgtggaactcaggcgccctgaccagcggcgtgcacaccttcccggctgtcctacagtcctcaggactctactccctcagcagcgtggtgaccgtgccctccagcagcttgggcacccagacctacatctgcaacgtgaatcacaagcccagcaacaccaaggtggacaagaatgag

SEQ ID NO: 2224 - DNA, 373 bp, Artificial Sequence
  Synthetic polynucleotide encoding artificial human antibody VH chain
gaggtgcagctggtgcagtctggagcagaggtgaaaaagcccggggagtctctgaagatctcctgtaggggttctggagacagcttcaacaagtactttatcggctgggtgcgccaggtgcccgggaaagccctggagtggatggggatcatctatcctggtgactctgataccagatacagtccgtctttccaaggccaggtcaccatctcagccgacaagtccatcaacatcgcctacctgcagtggaccagcctgaaggcctcggacaccgccatgtattactgtgcgagacaggcattttgtggtgctaattgctggtcgggcgcttatgatatctggggccaagggacaatggtcaccgtctcttcag

SEQ ID NO: 2225 - DNA, 672 bp, Artificial Sequence
  Synthetic polynucleotide encoding artificial human antibody VH chain
caggtacagcttgtggagtctgggggaggcgtggtccagcctgggaggtccctgagactctcctgtgcagcgtctggtttcacattcagtacctatggcatgaactgggtccgccaggctccaggcaaggggctggagtgggtggcagttacatggtatgaggggactaacgaagagtatgcagactccgtgaagggccgattcaccatctccagagacaactccaagaacacggtgtatttgcaaatgaatagtttgagagtcgacgatacggctgtgtattattgtgtgagaaggggggcgactgtatttcagggaaagataattaaaggctacatggacgtctggggcaaagggaccacggtcaccgtctcctcagcctccaccaagggcccatcggtcttccccctggcaccctcctccaagagcacctctgggggcacagcggccctgggctgcctggtcaaggactacttccccgaaccggtgacggtgtcgtggaactcaggcgccctgaccagcggcgtgcacaccttcccggctgtcctacagtcctcaggactctactccctcagcagcgtggtgaccgtgccctccagcagcttgggcacccagacctacatctgcaacgtgaatcacaagcccagcaacaccaaggtggacaagagagag

SEQ ID NO: 2226 - DNA, 645 bp, Artificial Sequence
  Synthetic polynucleotide encoding artificial human antibody VH chain
gtggtgcagttgttggagtctgggggaggcttggtacagcctggggggtccctgagactctcctgtacagcctctggattcgcctttagcagctatgccatgacctgggtccgccaggctccagggaaggggctggagtgggtctcagttatgagtggtagtggtgctggcacatactacgcagacgccgtgaagggccggttcaccatctccagagacaattccaagaacacgctgtatctgcaaatggaaagcctgagagtcgaagacacggccgtatattactgtgcgaaagtgaagggggggtccaatgactactggggccagggaaccctggtcaccgtctcctcagcctccaccaagggcccatcggtcttccccctggcaccctcctccaagagcacctctgggggcacagcggccctgggctgcctggtcaaggactacttccccgaaccggtgacggtgtcgtggaactcaggcgccctgaccagcggcgtgcacaccttcccggctgtcctacagtcctcaggactctactccctcagcagcgtggtgaccgtgccctccagcagcttgggcacccagacctacatctgcaacgtgaatcacaagcccagcaacaccaaggtggacaagaatgag

SEQ ID NO: 2227 - DNA, 654 bp, Artificial Sequence
  Synthetic polynucleotide encoding artificial human antibody VH chain
caggtgcagctggtggagtctgggggaggcgtggtccagcctgggaggtccctgagactctcctgtgcagcctctggattcaccttcagtaatcatgctatgcactgggtccgccaggctccaggcaaagggctggagtgggtggcagttatatcatatgatggaggcactaaatactacgcagactccgtgaagggccgattcaccatctccagagacaagtccaagaacacactgtatctgcaaatgaacagcctgagacctgaggacacggctctatattactgtgcgagacacctctacggtgacttttactacttagactactggggccagggaaccctggtcaccgtctcctcagcctccaccaagggcccatcggtcttccccctggcaccctcctccaagagcacctctgggggcacagcggccctgggctgcctggtcaaggactacttccccgaaccggtgacggtgtcgtggaactcaggcgccctgaccagcggcgtgcacaccttcccggctgtcctacagtcctcaggactctactccctcagcagcgtggtgaccgtgccctccagcagcttgggcacccagacctacatctgcaacgtgaatcacaagcccagcaacaccaaggtggacaagagaggt

SEQ ID NO: 2228 - DNA, 654 bp, Artificial Sequence
  Synthetic polynucleotide encoding artificial human antibody VH chain
caggtgcagctggtggagtctgggggaggcgtggtccggcctgggaggtccctgagactctcctgtgcagcgtctggattcaccttcagtagtcatggcatgcactgggtccgccaggctccaggcaaggggctggagtgggtggcagttatatggtatgatggaagtactaaatactatacagactccgtgaagggccgattcaccatctccagagacaattccaagaacacgttgttcctgcaattgaacagcctgagagccgaggacacggctgtgtattactgtgcgagagaccatcgtacggggagttattatcccgactactggggccagggaaccctggtcaccgtctcctcaacctccaccaagggcccatcggtcttccccctggcaccctcctccaagagcacctctgggggcacagcggccctgggctgcctggtcaaggactacttccccgaaccggtgacggtgtcgtggaactcaggcgccctgaccagcggcgtgcacaccttcccggctgtcctacagtcctcaggactctactccctcagcagcgtggtgaccgtgccctccagcagcttgggcacccagacctacatctgcaacgtgaatcacaagcccagcaacaccaaggtggacaagagagtt

SEQ ID NO: 2229 - DNA, 663 bp, Artificial Sequence
  Synthetic polynucleotide encoding artificial human antibody VH chain
caggtgcagctgcaggagtcgggcccaggactggtgaagccttcggagaccctgtccctcacctgcactgtctctggtggctccgtcgacaatgttgattcctactggagctggatccggcagcccccagggaagggactggagtggattgcatatatctatttcactgggagcaccaactacaacccctccctcaagagtcgagtcaccatatcaatagacacgtccaagaaccagttctccctgaaggtgaacgctgtgaccgctgcggacacggccgtgtattattgtgcgagaggggtgaggcagcagcaggttcggaagtggttcgacccctggggccggggaaccctggtcaccgtctcctcagcctccaccaagggcccatcggtcttccccctggcaccctcctccaagagcacctctgggggcacagcggccctgggctgcctggtcaaggactacttccccgaaccggtgacggtgtcgtggaactcaggcgccctgaccagcggcgtgcacaccttcccggctgtcctacagtcctcaggactctactccctcagcagcgtggtgaccgtgccctccagcagcttgggcacccagacctacatctgcaacgtgaatcacaagcccagcaacaccaaggtggacaagaatgag

SEQ ID NO: 2230 - DNA, 669 bp, Artificial Sequence
  Synthetic polynucleotide encoding artificial human antibody VH chain
ccggtgcagctggtgcagtctggagcagaggtgaaaaagccgggggagtctctgaagatctcctgtaagggttctggatacagctttaccacctactggatcggctgggtgcgccagatgcccgggaaaggcctggagtggatggggatcatctatcctggtgactctgataccagatacagcccgtccttccaaggccaggtcaccatctcagccgacaagtccatcagcaccgcctacctgcagtggaacagcctgaaggcctcggacaccgccatgtattactgtgcgatggataattcggggagcgggggcgttgactactggggccagggaaccctggtcaccgtctcctcagggagtgcatccgccccaacccttttccccctcgtctcctgtgagaattccccgtcggatacgagcagcgtggccgttggctgcctcgcacaggacttccttcccgactccatcactttctcctggaaatacaagaacaactctgacatcagcagcacccggggcttcccatcagtcctgagagggggcaagtacgcagccacctcacaggtgctgctgccttccaaggacgtcatgcagggcacagacgaacacgtggtgtgcaaagtccagcaccccaacggcaacaaagaaaagaacgtgcctcttcca

SEQ ID NO: 2231 - DNA, 654 bp, Artificial Sequence
  Synthetic polynucleotide encoding artificial human antibody VH chain
caggtgcagctgcaggagtcgggcccaggactggtgaagccttcacagaccctgcccctcacctgcactgtctctggtgactccatcagcagtgggagttactattggagctggatccggcagcccgccgggaagggactggagtggattgggcgtatctataccagtgggagcaccaagtacaacccctccctcaagagtcgagccaccatatcaatagacacgtccaagaaccagttctccctgaaactgagctctgtgaccgccgcagacacggccgtgtattactgtgcgagagatagttatcactactacggtatggacgtctggggccaagggaccacggtcaccgtctcctcagcctccaccaagggcccatcggtcttccccctggcaccctcctccaagagcacctctgggggcacagcggccctgggctgcctggtcaaggactacttccccgaaccggtgacggtgtcgtggaactcaggcgccctgaccagcggcgtgcacaccttcccggctgtcctacagtcctcaggactctactccctcagcagcgtggtgaccgtgccctccagcagcttgggcacccagacctacatctgcaacgtgaatcacaagcccagcaacaccaaggtggacaagagtgag

SEQ ID NO: 2232 - DNA, 672 bp, Artificial Sequence
  Synthetic polynucleotide encoding artificial human antibody VH chain
caggtacaactgcagcagtcaggtccaggactggtgaagccctcgcagaccctctcactcacctgtgccatctccggggacagtgtctctagcaacagtgctgcttggcactggatcaggcagtccccatcgagaggccttgagtggctgggaaggacacactacaggtccaagtggtataatgagtatgcagtatctgtgaagagtcgaataaccatcaacccagacatatccaaaaaccagttctccctgcagttgagctctgtgactcccgaggacacggctgtgtattactgtgcaagagagaccgtttacatctctacttactactacggtttggacgtctggggccaagggaccacggtcaccgtctcctcagcctccaccaagggcccatcggtcttccccctggcaccctcctccaagagcacctctgggggcacagcggccctgggctgcctggtcaaggactacttccccgaaccggtgacggtgtcgtggaactcaggcgccctgaccagcggcgtgcacaccttcccggctgtcctacagtcctcaggactctactccctcagcagcgtggtgaccgtgccctccagcagcttgggcacccagacctacatctgcaacgtgaatcacaagcccagcaacaccaaggtggacaagaaggtg

SEQ ID NO: 2233 - DNA, 654 bp, Artificial Sequence
  Synthetic polynucleotide encoding artificial human antibody VH chain
cccgtccagctgatacagtctggggctgaggtgaggaagcctggggcctcagtgaaggtctcttgcaaggtctccggatacaccctcagtgaattatccctgcactgggtgcgacaggctcctggaaaagggcttgagtggatgggaacttttgatcctgaagatggtgaaacagtctacgcacagaagttccagggcagagtcaccgtgaccgaggacacatctacagacacagcctacattgacctgagcagcctgaaatctgaggacacggccgtctattactgtgcaacagatgggcccttacatacgtcgggacttgactactggggccagggaaccctggtcaccgtctcctcagcctccaccaagggcccatcggtcttccccctggcgccctgctccaggagcacctccgagagcacagcggccctgggctgcctggtcaaggactacttccccgaaccggtgacggtgtcgtggaactcaggcgccctgaccagcggcgtgcacaccttcccggctgtcctacagtcctcaggactctactccctcagcagcgtggtgaccgtgccctccagcagcttgggcacccagacctacatctgcaacgtgaatcacaagcccagcaacaccaaggtggacaagagagtg

SEQ ID NO: 2234 - DNA, 654 bp, Artificial Sequence
  Synthetic polynucleotide encoding artificial human antibody VH chain
gtggtgcagctggtggagtctgggggaggcctggtcaagcctggggggtccctgagactctcctgtgcagcctctggattcaccttcagtagctatagcatgaactgggtccgccaggctccagggaaggggctggagtgggtctcatccattagtagtagtagtagttacatatactacgcagactcagtgaagggccgattcaccatctccagagacaacgccaagaactcactgtatctgcaaatgaacagcctgagagccgaggacacggctgtgtattactgtgcgtgcttgggggctgaggcgaacgatgcttttgatatctggggccaagggacaatggtcaccgtctcttcagcctccaccaagggcccatcggtcttccccctggcaccctcctccaagagcacctctgggggcacagcggccctgggctgcctggtcaaggactacttccccgaaccggtgacggtgtcgtggaactcaggcgccctgaccagcggcgtgcacaccttcccggctgtcctacagtcctcaggactctactccctcagcagcgtggtgaccgtgccctccagcagcttgggcacccagacctacatctgcaacgtgaatcacaagcccagcaacaccaaggtggacaagagagtg

SEQ ID NO: 2235 - DNA, 638 bp, Artificial Sequence
  Synthetic polynucleotide encoding artificial human antibody VH chain
gagaggtgcagctcttggagtctgggggaggcttggtacagcctggggggtccctgagactctcctgtgcagcctctggattcacctttagcaactatgccatgaactgggtccgccaggctccagggaaggggctggactgggtctcagctattagtggtagtggtggtagtacatactacgcagactccgtgaagggccgcttcaccatctccagagacatttccaagaacacgctgtatctgcaaatgaacagcctgagagccgaggacacggccgtctattactgtgcgaaagtccctggggactactggggccagggaaccctggtcaccgtctcctcagcctccaccaagggcccatcggtcttccccctggcaccctcctccaagagcacctctgggggcacagcagccctgggctgcctggtcaaggactacttccccgaaccggtgacggtgtcgtggaactcaggcgccctgaccagcggcgtgcacaccttcccggctgtcctacagtcctcaggactctactccctcagcagcgtggtgaccgtgccctccagcagcttgggcacccagacctacatctgcaacgtgaatcacaagcccagcaacaccaaggtggacaagaatgag

SEQ ID NO: 2236 - DNA, 660 bp, Artificial Sequence
  Synthetic polynucleotide encoding artificial human antibody VH chain
caggtcaagctggtgcaatctggggctgaggtgaagaagcctgggtcctcggtaaaggtctcctgcaagacttctggaggccccttcagcagctatactatcacctgggtgcgacaggcccctggacaagggcctgagtggatgggaaggatcacccctatttttaatataacgaactacgcacagaacttccagggcagaatgacgatgaccgcggacaaatccacgaccacggcctacatggaattgagcggcctgaaatctgaggacacggccgtctattactgtgcgagagcgggccttagtaccagttggccgagctggttcgacccctggggccagggaaccctggtcaccgtctcctcagcctccaccaagggcccatcggtcttccccctggcaccctcctccaagagcacctctgggggcacagcggccctgggctgcctggtcaaggactacttccccgaaccggtgacggtgtcgtggaactcaggcgccctgaccagcggcgtgcacaccttcccggctgtcctacagtcctcaggactctactccctcagcagcgtggtgaccgtgccctccagcagcttgggcacccagacctacatctgcaacgtgaatcacaagcccagcaacaccaaggtggacaagaaagtg

SEQ ID NO: 2237 - DNA, 660 bp, Artificial Sequence
  Synthetic polynucleotide encoding artificial human antibody VH chain
caggtgcagctgcaggagtcgggcccaggactggtgaagccgtcacagaccctgtcgctcacctgcacggtgtctggtggctccgtcaacactggtacttcctactggacctgggtccgccagcgcccagggaagggcctggagtggattgggttcatctattatagtgggagcacctactacaatccagccctcgagagtcgacttaccatatcactagacacctctcagaatcagttctccctgaaattgacctctgtgactgccgcggacacggccgtgtatttctgtgcgagaaacgatatttccttcaaacagagtgctatcgacgtctggggccaagggaccacggtcaccgtctcctcagcctccaccaagggcccatcggtcttccccctggcaccctcctccaagagcacctctgggggcacagcggccctgggctgcctggtcaaggactacttccccgaaccggtgacggtgtcgtggaactcaggcgccctgaccagcggcgtgcacaccttcccggctgtcctacagtcctcaggactctactccctcagcagcgtggtgaccgtgccctccagcagcttgggcacccagacctacatctgcaacgtgaatcacaagcccagcaacaccaaggtggacaagagagtg

SEQ ID NO: 2238 - DNA, 666 bp, Artificial Sequence
  Synthetic polynucleotide encoding artificial human antibody VH chain
caggtgcacctggcagagtcggggggaggcgtggtccagacgggggggtccctgagactctcctgtgcagtgtctggattccatttcggcagtcacggcatgacctgggtccgccaggccccaggcaagggcctggagtggctgtcatttataacttatgatggacaaatcaaatattatggagggtccgtgaagggccgattcaacatctccagagacaattccaagaacactctccacctgcacatgaacggcctgagagttgaggacacggctgtttactactgtgcgaaaacgaagactatgggtgtggggggagagtatttcggcttggacgtctggggcctagggacgacggtcatcgtctcctcagcctccaccaagggcccatcggtcttccccctggcaccctcctccaagagcacctctgggggcacagcggccctgggctgcctggtcaaggactacttccccgaatcggtgacggtgtcgtggaactcaggcgccctgaccagcggcgtgcacaccttcccggctgtcctacagtcctcaggactctactccctcagcagcgtggtgaccgtgccctccagcagcttgggcacccagacctacatctgcaacgtgaatcacaagcccagcaacaccaaggtggacaagaaagtg

SEQ ID NO: 2239 - DNA, 666 bp, Artificial Sequence
  Synthetic polynucleotide encoding artificial human antibody VH chain
cccctgcagctgcatgagtcgggcccaggactggcgaagccttcggagaccctgtccctcacctgcactctctctggtggctccatcaccactggtagttattactgggcctggatccgccaggctccagggaaggctctggagtggattgggaccatttattatagtgggaccacctactataattcgtccctcaacaatcgactcaccatttccgtggacacgtccaagaaccagctctccttgaagctggtttctgtggccgccgcagacacggctatatattactgtgcgagacacaaggccctctggttcggggaggcaggggcttttgatatctggggtcaagggacaatggtcacggtctcttcagcctccaccaagggcccatcggtcttccccctggcaccctcctccaagagcacctctgggggcacagcggccctgggctgcctggtcaaggactacttccccgaaccggtgacggtgtcgtggaactcaggcgccctgaccagcggcgtgcacaccttcccggctgtcctacagtcctcaggactctactccctcagcagcgtggtgaccgtgccctccagcagcttgggcacccagacctacatctgcaacgtgaatcacaagcccagcaacaccaaggtggacaagaaggtg

SEQ ID NO: 2240 - DNA, 669 bp, Artificial Sequence
  Synthetic polynucleotide encoding artificial human antibody VH chain
gaagtgcagctggtggagtctgggggaggcttggtacagcctggcaggtccctgagactctcctgtgcagcctctggattcacctttgatgattatgccatgcactgggtccggcaagctccagggaagggcctggagtgggtctcaggtattagttggaatagtggtagcataggctatgcggactctgtgaagggccgattcaccatctccagagacaacgccaagaactccctgtatctgcaaatgaacagtctgagagctgaggacacggccttgtattactgtgcaaaagatttgttagggttcagggaccaaaggaactactacggtatggacgtctggggccaagggaccacggtcaccgtctcctcagcctccaccaagggcccatcggtcttccccctggcaccctcctccaagagcacctctgggggcacagcggccctgggctgcctggtcaaggactacttccccgaaccggtgacggtgtcgtggaactcaggcgccctgaccagcggcgtgcacaccttcccggctgtcctacagtcctcaggactctactccctcagcagcgtggtgaccgtgccctccagcagcttgggcacccagacctacatctgcaacgtgaatcacaagcccagcaacaccaaggtggacaagagagtt

SEQ ID NO: 2241 - DNA, 358 bp, Artificial Sequence
  Synthetic polynucleotide encoding artificial human antibody VH chain
caggtgcaactgcaggagtcgggcccaggactggtgaagccttcggagaccctgtccctcagttgcactgtctcaggtgcctccatgaataattactactggagttggatcaggcagtccgccgggaagggtctggaatggattgggcgtatatatagtagtggagacaccgactacaacccctccctgaagactcgagtcaccatgtcaatagacacgtccaagaaccagttctccctgaacctagactctgtgaccgccgcggacacggccacatattactgtgcgagaagcttctacgacacccttttctactttgagaactggggccagggaaccctcgtcaccgtctcctcag

SEQ ID NO: 2242 - DNA, 656 bp, Artificial Sequence
  Synthetic polynucleotide encoding artificial human antibody VH chain
cccagatcaccttgaaggagtctggtcctacgctggtgaaacccacacagaccctcacgctgacctgcaccttctctgggttctcactcaccactactgacgtgggtgtgggctggatccgtcagcccccaggaaaggccctggaatggcttacaatcatttattgggatgatgatgagcgctacagtccatccctgaagagcaggctcaccatcaccaaggacacctccaaaaaccaggtggtcctctcaatgaccaacatggaccctgtggacacagccacatattactgtgcacgcgtttatagtaccaagtgggactttgactactggggccagggaaccctggtcaccgtctcctcagcctccaccaagggcccatcggtcttccccctggcaccctcctccaagagcacctctgggggcacagcggccctgggctgcctggtcaaggactacttccccgaaccggtgacggtgtcgtggaactcaggcgccctgaccagcggcgtgcacaccttcccggctgtcctacagtcctcaggactctactccctcagcagcgtggtgaccgtgccctccagcagcttgggcacccagacctacatctgcaacgtgaatcacaagcccagcaacaccaaggtggacaagagagtg

SEQ ID NO: 2243 - DNA, 648 bp, Artificial Sequence
  Synthetic polynucleotide encoding artificial human antibody VH chain
gtggtgcagctggtggagtctgggggaggcttggttcagcctggggggtccctgagactctcctgtgcagcctctggattcaccttcagtagctattccatgaactgggtccgccaggctccagggaagggtctggagtggctttcatacgttagcagtagtggtagtaccatgtactatgcagactctgtgaagggccgattcaccatctccagagacactgccaagaactcactgtttctgcaaatgaacagcctgagagccgaggacacggctgtttattactgtgcgaaagggggccctttacgtccttttgatatctggggccaagggacactggtcaccgtctcttcagcctccaccaagggcccatcggtcttccccctggcaccctcctccaagagcacctctgggggcacagcggccctgggctgcctggtcaaggactacttccccgaaccggtgacggtgtcgtggaactcaggcgccctgaccagcggcgtgcacaccttcccggctgtcctacagtcctcaggactctactccctcagcagcgtggtgaccgtgccctccagcagcttgggcacccagacctacatctgcaacgtgaatcacaagcccagcaacaccaaggtggacaagaaagtg

SEQ ID NO: 2244 - DNA, 678 bp, Artificial Sequence
  Synthetic polynucleotide encoding artificial human antibody VH chain
gccgtgcagctggtgcagtctggagcagaggtgaaaaagcccggggagtctctgaagatctcctgtaggggttctggatacaactttatcagccactggatcagctgggtgcgccagatgcccgggaaaggcctggagtggcagtggctggggaggattgatcctagtgactcttataccaattacagcccgtccttccgaggccacgtcaccatctcagttgacaagtccgtcaacactgcctacctgcaatggaacagcctgaaggcctcggacaccgccatgtattactgtgcgagacttagtagagacggctacaccattgagcactttgactactggggccagggaaccctggtcaccgtctcctcagcatccccgaccagccccaaggtcttcccgctgagcctcgacagcaccccccaagatgggaacgtggtcgtcgcatgcctggtccagggcttcttcccccaggagccactcagtgtgacctggagcgaaagcggacagaacgtgaccgccagaaacttcccacctagccaggatgcctccggggacctgtacaccacgagcagccagctgaccctgccggccacacagtgcccagacggcaagtccgtgacatgccacgtgaagcactacacgaatcccagccaggatgtgactgtgccctgcccg

SEQ ID NO: 2245 - DNA, 674 bp, Artificial Sequence
  Synthetic polynucleotide encoding artificial human antibody VH chain
ccgaggtgcagctggtgcagtctggagcagaggtgaaaaagcccggggagtctctgaagatctcctgtaagggttctggatacagctttaccagcttctggatcggctgggtgcgccagatgcccgggaaaggcctggagtggatggggatcatctttcctgctgactctgataccagatacagcccgtcattccaaggccaggtcatcatctcagtcgacaagtccatcagcaccgcctacctgcagtggagcagcctgaaggcctcggacaccgccatgtattactgtgcgagacgcggggttagtggtgggagcgcctggacgtattacaactttttcgacccctggggccagggaaccctggtcaccgtcgcctcagcctccaccaagggcccatcggtcttccccctggcaccctcctccaagagcacctctgggggcacagcagccctgggctgcctggtcaaggactacttccccgaaccggtgacggtgtcgtggaactcaggcgccctgaccagcggcgtgcacaccttcccggctgtcctacagtcctcaggactctactccctcagcagcgtggtgaccgtgccctccagcagcttgggcacccagacctacatctgcaacgtgaatcacaagcccagcaacaccaaggtggacaagaaggtg

SEQ ID NO: 2246 - DNA, 666 bp, Artificial Sequence
  Synthetic polynucleotide encoding artificial human antibody VH chain
cccgtgcagctgcaggagtcgggcccaggactggtgaagccttcggagaccctgtccctcacctgcactgtctctggtggctccatcgatagttattactggagctggctccggcagcccccagggaggggactagagtggattgggtatatcttttacagtggaattaccaactacagcccttccctcaagagtcgagtcaccatatcggtcgacacgtccaagaaccagttctccctgaaactgaactctgtgaccgctgcggacacggccgtgtattactgtgcgagagaacttcccgtgattggtagacgtacttttgatatctggggccaagggacaatggtcaccgtctcttcagcatccccgaccagccccaaggtcttcccgctgagcctctgcagcacccagccagatgggaacgtggtcatcgcctgcctggtccagggcttcttcccccaggagccactcagtgtgacctggagcgaaagcggacagggcgtgaccgccagaaacttcccacccagccaggatgcctccggggacctgtacaccacgagcagccagctgaccctgccggccacacagtgcctagccggcaagtccgtgacatgccacgtgaagcactacacgaatcccagccaggatgtgactgtgccctgcccg

SEQ ID NO: 2247 - DNA, 681 bp, Artificial Sequence
  Synthetic polynucleotide encoding artificial human antibody VH chain
cccgtgcatctggtgcagtctggggctgaggtgaagaagcctgggtcctcggtgaaggtctcctgcaaactttctggaggcatcttcagttactttgctatcatctgggtgcgacaggcccctggacaaggccttgagtggatgggaacgatcatccctatttttggaacatcaaactacgcagagaaattccaggacagagtcgcgattgtcgcggacgaggccacgagtacagtttacatggaggtgaacagcctgagatctgaggacacggccatatatttctgtgcgagagattccgaggtggaaaagagtgatgggtacatggcctcgaccgctgaatacttccaactctggggccagggcaccctggtcaccgtctcttcagcctccaccaagggcccatcggtcttccccctggcaccctcctccaagagcacctctgggggcacagcggccctgggctgcctggtcaaggactacttccccgaaccggtgacggtgtcgtggaactcaggcgccctgaccagcggcgtgcacaccttcccggctgtcctacagtcctcaggactctactccctcagcagcgtggtgaccgtgccctccagcagcttgggcacccagacctacatctgcaacgtgaatcacaagcccagcaacaccaaggtggacaagaaggtg

SEQ ID NO: 2248 - DNA, 665 bp, Artificial Sequence
  Synthetic polynucleotide encoding artificial human antibody VH chain
gaagtgcgatgcacctggtggagtctgggggagccgtggtccagccgggggagtccctgaggctctcctgttcagcctttgaattcagctttcaatatttttccatgttctgggtccgtcaagctccgacgaagggtcttgagttggtcgctcaaatcacttgggatggttctataataaactacgcagactctgtgaagggccgattcaccatctccagagacaacagcaaaaactccctgtatcttcaaatgaccagtctaagaagtgacgacaccgccgtgtattactgtgtaaaagcaggtgtcccgtgggaggtccagcgatggttcgacccctggggccagggaaccccggtcaccgtctcctcagcctccaccaagggcccatcggtcttccccctggcgccctgctccaggagcacctccgagagcacagcggccctgggctgcctggtcaaggactacttccccgaaccggtgacggtgtcgtggaactcaggcgctctgaccagcggcgtgcacaccttcccagctgtcctacagtcctcaggactctactccctcagcagcgtggtgaccgtgccctccagcaacttcggcacccagacctacacctgcaacgtagatcacaagcccagcaacaccaaggtggacaagacagtg

SEQ ID NO: 2249 - DNA, 666 bp, Artificial Sequence
  Synthetic polynucleotide encoding artificial human antibody VH chain
caggttcacctggtgcagtctggagctgaagtgaagaggcctggggcctcagtgaaggtctcctgcaagggttctggttacacccttaacaatgatgtcgctttcagttgggtgcgacaggcccctggacaagggcctgagtggctgggatggatcaatgcttaccagggcgtcacaaatatttccccgaatttccgggccagagtcaccatgaccacagacacatccacgaacacaatttacatggacctccagaacctgaggtccgacgacacggccatctattactgtgcgagagatcgtcagggcctaggccgtatggacgtctggggccaggggaccacggtcatcgtctcctcagcatccccgaccagccccaaggtcttcccgctgagcctctgcagcacccagccagatgggaacgtggtcatcgcctgcctggtccagggcttcttcccccaggagccactcagtgtgacctggagcgaaagcggacagggcgtgaccgccagaaacttcccacccagccaggatgcctccggggacctgtacaccacgagcagccagctgaccctgccggccacacagtgcctagccggcaagtccgtgacatgccacgtgaagcactacacgaatcccagccaggatgtgactgtgccctgcccg

SEQ ID NO: 2250 - DNA, 651 bp, Artificial Sequence
  Synthetic polynucleotide encoding artificial human antibody VH chain
gtggtgcagctggtggagtctgggggaggcttggtccagcctggggggtccctcagactctcctgtgcagcctctggattcaggtttaattactattggatgagctgggtccgccaggctccagggaaaggcctggagtgggtggccaacataaaggaagatggaagtgagaaatactatgtggactctgtgaagggccgattcaccatctccagagacaacgccaagaactcactgtatctggaaatgaacagcctgagagtcgaggacacggctgtctattactgtgcgagggaactgggtgcgaactactactttgcctattggggccagggagccctggtcaccgtctcctcagcctccaccaagggcccatcggtcttccccctggcaccctcctccaagagcacctctgggggcacagcggccctgggctgcctggtcaaggactacttccccgaaccggtgacggtgtcgtggaactcaggcgccctgaccagcggcgtgcacaccttcccggctgtcctacagtcctcaggactctactccctcagcagcgtggtgaccgtgccctccagcagcttgggcacccagacctacatctgcaacgtgaatcacaagcccagcaacaccaaggtggacaagagagtg

SEQ ID NO: 2251 - DNA, 665 bp, Artificial Sequence
  Synthetic polynucleotide encoding artificial human antibody VH chain
cccaggtgcagctgcaggagtcgggcccaggactggtgaagccttcacagaccctgtccctcacctgcattgtctctggtggctccatcagtggtgataaaaacttctggagttgggtccgccagcacccagagaagggcctggagtggcttgggtacatctcttacaatgggaacacctactacaatccgtcgctcatcagtcgaattatcatatcactagacaccccaaagaacctgttctccctgaggttgagctctgtgactgtcgcggacacggccatttattactgtgcgagggaagtcgatatacgtggagacagcgatgcttttgatatttggggccgagggacagtggtcaccgtttcttcagcctccaccaagggcccatcggtcttccccctggcgccctgctccaggagcacctccgagagcacagcggccctgggctgcctggtcaaggactacttccccgaaccggtgacggtgtcgtggaactcaggcgctctgaccagcggcgtgcacaccttcccggctgtcctacagtcctcaggactctactccctcagcagcgtggtgaccgtgacctccagcaacttcggcacccagacctacacctgcaacgtagatcacaagcccagcaacaccaaggtggacaagacagtg

SEQ ID NO: 2252 - DNA, 654 bp, Artificial Sequence
  Synthetic polynucleotide encoding artificial human antibody VH chain
caggtgcggctggtggagtctgggggaggcttggtacagcctggagggttcctaagactctcctgtgcagcctctggattcacattcagtgattatgaaatgaactgggtccgccaggctccagggaaggggctggagtggatttcacacattggtagtagtgggacatacgcagactctgtgaagggccgattcaccatctccagagacaacgccaagaactcactctatctgcaaatgagcagcctgcgagccgaggacgcgggcgtttattactgtgcgactacccgaaactcagctttcctcaactggggccagggaaccctggtcaccgtctcctcagggagtgcatccgccccaacccttttccccctcgtctcctgtgagaattccccgtcggatacgagcagcgtggccgttggctgcctcgcacaggacttccttcccgactccatcactttctcctggaaatacaagaacaactctgacatcagcagcacccggggcttcccatcagtcctgagagggggcaagtacgcagccacctcacaggtgctgctgccttccaaggacgtcatgcagggcacagacgaacacgtggtgtgcaaagtccagcaccccaacggcaacaaagaaaagaacgtgcctcttcca

SEQ ID NO: 2253 - DNA, 657 bp, Artificial Sequence
  Synthetic polynucleotide encoding artificial human antibody VH chain
gaggtgcagctggtggagtctgggggaggcttggtacagccgggggggtccctgagactctcctgtgcagcctctggattcccccctaggagttttgccatgagttgggtccgccaggctccagggaaggggctggagtgggtctcaagtattagtggtcttggaaatagtatatattatgcggagtccgtgaagggccgattcatcacctccagagacaattccaagagcacagtgtttctgctaatgaacagcctgagagccgaggacacggccgtatattattgtgcgaagtccgcatttgggggagttcctgatggttttgatatctggggccaagggacaatggtcaccgtctcttcagcctccaccaagggcccatcggtcttccccctggcgccctgctccaggagcacctccgagagcacagcggccctgggctgcctggtcaaggactacttccccgaaccggtgacggtgtcgtggaactcaggcgccctgaccagcggcgtgcacaccttcccggctgtcctacagtcctcaggactctactccctcagcagcgtggtgaccgtgccctccagcagcttgggcacccagacctacatctgcaacgtagatcacaagcccagcaacaccaaggtggacaagacagtg

SEQ ID NO: 2254 - DNA, 636 bp, Artificial Sequence
  Synthetic polynucleotide encoding artificial human antibody VH chain
ccggtgcagctggtggagtctgggggaggcgtggtccagcctgggaggtccctgagactctcctgtgcagcctctggattcaccttcagcaactatgggatgcactgggtccgccaggctccaggcaaggggctggagtgggtggcagttatatcagatgatgggaatgataaagacaacgcagactccgtgaagggccgattcaccatctccagagacaattccaagaatacgctgtatctgcgaatgaacagcctgagacgagaggacacggctgtgtattattgtgcgagagatgggtttgactactggggccagggaaccctggtcaccgtctcctcagcctccaccaagggcccatcggtcttccccctggcaccctcctccaagagcacctctgggggcacagcggccctgggctgcctggtcaaggactacttccccgaaccggtgacggtgtcgtggaactcaggcgccctgaccagcggcgtgcacaccttcccggctgtcctacagtcctcaggactctactccctcagcagcgtggtgaccgtgccctccagcagcttgggcacccagacctacatctgcaacgtgaatcacaagcccagcaacaccaaggtggacaagaatgtg

SEQ ID NO: 2255 - DNA, 361 bp, Artificial Sequence
  Synthetic polynucleotide encoding artificial human antibody VH chain
gaagtgcagctggtggagtctgggggagtcgtggtacagccgggggggtccctgagactctcctgtgcagcctctggattcacctttgatgattataccatgcactgggtccgtcaagctccggggaagggtctggaatgggtctctcttattagttgggatggtggtagcacatactatgcagactctgtgaagggccgattcaccatctccagagacaacagcaaaaactccctgtatctgcaaatgaacagtctgagaactgaagacaccgccttgtattactgtgcaaaagcgggatacagctttactaccgctcctgactactggggccagggaaccctggtcaccgtctcctcag

SEQ ID NO: 2256 - DNA, 657 bp, Artificial Sequence
  Synthetic polynucleotide encoding artificial human antibody VH chain
cccgttcaattggtgcagtctggagctgaggtgaagaagcctggggcctcagtgaaggtctcctgcaaggcctctggtgacacctttcccaactatgttatcagctgggtgcgacaggcccctggacaagggcttgagtgggtgggatgtatcaacacgaacaatggtaaaacaaattatgtgcagaagctccagggcagagtcatcttgaccacagacacatccacaaacacagccaacatggagctgaggagtctgagatttgacgacacggccgtttattactgtgcgcgagagagaggccaggtccgttcctacggcatggacgtctggggccaagggaccgcggtcaccgtctcctcagcttccaccaagggcccatccgtcttccccctggcgccctgctccaggagcacctccgagagcacagccgccctgggctgcctggtcaaggactacttccccgaaccggtgacggtgtcgtggaactcaggcgccctgaccagcggcgtgcacaccttcccggctgtcctacagtcctcaggactctactccctcagcagcgtggtgaccgtgccctccagcagcttgggcacgaagacctacacctgcaacgtagatcacaagcccagcaacaccaaggtggacaagagagtg

SEQ ID NO: 2257 - DNA, 684 bp, Artificial Sequence
  Synthetic polynucleotide encoding artificial human antibody VH chain
gaggttcagttggtggagtctgggggaggcttggtacagcctggcaggtccctgagactctcctgtgcagcctctggattcacatttgatgattatgccatgcactgggtccgacaacctccagggaggggcctggagtgggtctcaggtatcgattggagtggaaagaccacagagtatgcacagtctgtgaagggccgattcaccatctccagagacaacgccaagaactccctatatctgcaaatgaacagtctgagagttgaagacacggccttgtatttctgtgtaaaaattggcggggatgggacagcctacgcttggacctttaggcactttgactcctggggccagggtacccgggtcaccgtctcgtcagcatccccgaccagccccaaggtcttcccgctgagcctctgcagcacccagccagatgggaacgtggtcatcgcctgcctggtccagggcttcttcccccaggagccactcagtgtgacctggagcgaaagcggacagggcgtgaccgccagaaacttcccacccagccaggatgcctccggggacctgtacaccacgagcagccagctgaccctgccggccacacagtgcctagccggcaagtccgtgacatgccacgtgaagcactacacgaatcccagccaggatgtgactgtgccctgccca

SEQ ID NO: 2258 - DNA, 654 bp, Artificial Sequence
  Synthetic polynucleotide encoding artificial human antibody VH chain
gaggtgcagctgttggagtctgggggaggcttggtacagcctggggggtccctgagactctcctgtgcagcctctggattcacctttagcagctatgccatgagctgggtccgccaggctccagggaaggggctggagtgggtctcagctattagtggtagtggtggtagcacatactacgcagactccgtgaagggccggttcaccatctccagagacaattccaagaacacgctgtatctgcaaatgaacagcctgagagccgaggacacggccgtatattactgtgcgagagggttgggtggagattggaactaccttgcctactggggccagggaaccctggtcaccgtctcctcagcttccaccaagggcccatcggtcttccccctggcgccctgctccaggagcacctctgggggcacagcggccctgggctgcctggtcaaggactacttccccgaaccggtgacggtgtcgtggaactcaggcgccctgaccagcggcgtgcacaccttcccggctgtcctacagtcctcaggactctactccctcagcagcgtggtgaccgtgccctccagcagcttgggcacccagacctacacctgcaacgtgaatcacaagcccagcaacaccaaggtggacaagagagtt

SEQ ID NO: 2259 - DNA, 678 bp, Artificial Sequence
  Synthetic polynucleotide encoding artificial human antibody VH chain
caggtgcagctggtggagtctgggggaggcgtggtccagcctgggaggtccctgagactctcctgtgcagcctctggattcaccttcagtaactatgacatgcactgggtccgccaggctccaggcaaggggctggagtgggtgacagttgtatcatatgatggaactaataaatattatgcagagtccgtgcagggccgattcaccatctccagagacaattccaagaacacgctgtatctgcaaatgaacagcctgagaactgaggacacggctgtgtattactgtgcgaaagaaggtggatgggggaatacagtaactacgtcctactactactacggtatggatgtctggggccaagggaccacggtcaccgtctcctcagcctccaccaagggcccatcggtcttccccctggcaccctcctccaagagcacctctgggggcacagcggccctgggctgcctggtcaaggactacttccccgaaccggtgacggtgtcgtggaactcaggcgccctgaccagcggcgtgcacaccttcccggctgtcctacagtcctcaggactctactccctcagcagcgtggtgaccgtgccctccagcagcttgggcacccagacctacatctgcaacgtgaatcacaagcccagcaacaccaaggtggacaagagagtc

SEQ ID NO: 2260 - DNA, 657 bp, Artificial Sequence
  Synthetic polynucleotide encoding artificial human antibody VH chain
gaggtgcagttggtggagtctgggggaggcctggtcaggccgggggggtccctgagactctcctgtgttggctctggattcaccttcagtccctatagtataaactgggtccgccaggctccagggaaggggctggagtgggtctcatcgattactagtaccagtagttacttagactacgcagactcagtaaagggccgattcaccatctccagagacaacgccaagaactcagtgtatctgcaaatgaacagcctgagagtcgaggacacggctgtctattactgtacgagggatgggggatacttcgcaactggcgagtttgactactggggccagggaaccatggtcaccgtctcctcagcctccaccaagggcccatcggtcttccccctggcaccctcctccaagagcacctctgggggcacagcggccctgggctgcctggtcaaggactacttccccgaaccggtgacggtgtcgtggaactcaggcgccctgaccagcggcgtgcacaccttcccggctgtcctacagtcctcaggactctactccctcagcagcgtggtgaccgtgccctccagcagcttgggcacccagacctacatctgcaacgtgaatcacaagcccagcaacaccaaggtggacaagagagct

SEQ ID NO: 2261 - DNA, 666 bp, Artificial Sequence
  Synthetic polynucleotide encoding artificial human antibody VH chain
ccggtgcagctgcaggagtcgggcccaggactggtgaagccttcacagaccctgtccctcacctgcactgtctctggtggctccatcaccagtggtagttacttctggagttggatccggcagcccgccggggaggggctggagtggattgggcgtatatataccagtgggagcaccaactacaacccctccctcaagagtcgagtcaccatatcagcagacacgtccaagaaccacttctccctggagctgagctctgtgaccgccgcagacacggccatgtatttctgtgcgagagagcgctttggccaaggtgcccttgactactggggccagggaaccctggtcaccgtctcctcagcatccccgaccagccccaaggtcttcccgctgagcctcgacagcaccccccaagatgggaacgtggtcgtcgcatgcctggtccagggcttcttcccccaggagccactcagtgtgacctggagcgaaagcggacagaacgtgaccgccagaaacttcccacctagccaggatgcctccggggacctgtacaccacgagcagccagctgaccctgccggccacacagtgcccagacggcaagtccgtgacatgccacgtgaagcactacacgaattccagccaggatgtgactgtgccctgcccc

SEQ ID NO: 2262 - DNA, 663 bp, Artificial Sequence
  Synthetic polynucleotide encoding artificial human antibody VH chain
cagctgcatctgcaggagtcgggcccaggactggtgaagccttcggagacactgtccctcacctgcactgtctctggtggctccgtcagcagtagtagttactactggggctgggtccgccagcccccagggaaggggctggagtggattggccatgtctattacagtgggaggacctactacaacccgtccctcaagagtcgagccaccatatccttagatacgtccaagaatcagttttccctgaagctgagctctctcaccgccacagacacggctgtctattactgtgcgaccatcgtcgctgcctacagctatggtttcgagttcgacccctggggccagggaatcctggtcatcgtctcctcagcctccaccaagggcccatcggtcttccccctggcaccctcctccaagagcacctctgggggcacagcggccctgggctgcctggtcaaggactacttccccgaaccggtgacggtgtcgtggaactcaggcgccctgaccagcggcgtgcacaccttcccggctgtcctacagtcctcaggactctactccctcagcagcgtggtgaccgtgccctccagcagcttgggcacccagacctacatctgcaacgtgaatcacaagcccagcaacaccaaggtggacaagagagcc

SEQ ID NO: 2263 - DNA, 678 bp, Artificial Sequence
  Synthetic polynucleotide encoding artificial human antibody VH chain
caggtgcagctggtggagtctgggggaggcgtggtccagcctgggaggtccctgagactctcctgtgcagcctctggattcaccttcagtaactatgacatgcactgggtccgccaggctccaggcaaggggctggagtgggtgacagttgtatcatatgatggaactaataaatattatgcagagtccgtgcagggccgattcaccatctccagagacaattccaagaacacgctgtatctgcaaatgaacagcctgagaactgaggacacggctgtgtattactgtgcgaaagaaggtggatgggggaatacagtaactacgtcctactactactacggtatggatgtctggggccaagggaccacggtcaccgtctcctcagcctccaccaagggcccatcggtcttccccctggcaccctcctccaagagcacctctgggggcacagcggccctgggctgcctggtcaaggactacttccccgaaccggtgacggtgtcgtggaactcaggcgccctgaccagcggcgtgcacaccttcccggctgtcctacagtcctcaggactctactccctcagcagcgtggtgaccgtgccctccagcagcttgggcacccagacctacatctgcaacgtgaatcacaagcccagcaacaccaaggtggacaagagagtt

SEQ ID NO: 2264 - DNA, 365 bp, Artificial Sequence
  Synthetic polynucleotide encoding artificial human antibody VH chain
ggttcagctggtgcagtctggagcagaggtgagaaagccgggggagtctctgacgatctcctgtaagacttctggctacgcctttatcggtaactggatcggctgggtgcgccagaggcccgggaaaggcctggagtggatcggaatgatttatcctgttgactctgataccagatatagtccgtccttccaaggccaggtcaccatctcagtcgacaagtccatcaggaccgcctatctgcagtggaacagtctgcgggcctcagacaccgccacctattattgtgcgcgacagggatttgaggctctggttattcgaggctttgactactggggccagggaaccgttgtcactgtctcctcag

SEQ ID NO: 2265 - DNA, 668 bp, Artificial Sequence
  Synthetic polynucleotide encoding artificial human antibody VH chain
gtgaggggcagctgttggagtctgggggaggcttggttcagccgggggggtccctgagactctcctgtgaagcctctggattcaccttttcctttagcagttatgccatgagttgggtccgccaggctccagggaggggactggagtgggtctcagttaccggtggtagtggttataccaaatactacgcagactccgtgaagggccggttcaccgtctccagagacaattccaagaacaccctctatctgcaaatgaacagcctgcgagccgaggacacggccctatattactgtgcgaggagatctaccagtagcccctctttcagcactctggacgtctggggccgaggggccacggtcatcgtctcctcagcctccaccaagggcccatcggtcttccccctggcaccctcctccaagagcacctctgggggcacagcggccctgggctgcctggtcaaggactacttccccgaaccggtgacggtgtcgtggaactcaggcgccctgaccagcggcgtgcacaccttcccggctgtcctacagtcctcaggactctactccctcagcagcgtggtgaccgtgccctccagcagcttgggcacccagacctacatctgcaacgtgaatcacaagcccagcaacaccaaggtggacaagagtgag

SEQ ID NO: 2266 - DNA, 645 bp, Artificial Sequence
  Synthetic polynucleotide encoding artificial human antibody VH chain
gtggtgcagctggtggagtctgggggaggcttggtacagcctggagggtccctgagactctcctgtgcagcctctggattcaccttcaataattatgaaatgaactgggtccgccaggctccagggaaggggctggagtgggtttcatacattagtagtagtggtagtaccatatactatgcagactctgtgaagggccgattcaccatctccagagacaacgccaagaactcactgtatctgcaaatgaacagcctgagagccgaggacacggctgtttattactgtgcgagacaaatggtgactacgaggggctactggggccagggaaccctggtcaccgtctcctcagcctccaccaagggcccatcggtcttccccctggcaccctcctccaagagcacctctgggggcacagcggccctgggctgcctggtcaaggactacttccccgaaccggtgacggtgtcgtggaactcaggcgccctgaccagcggcgtgcacaccttcccggctgtcctacagtcctcaggactctactccctcagcagcgtggtgaccgtgccctccagcagcttgggcacccagacctacatctgcaacgtgaatcacaagcccagcaacaccaaggtggacaagaatgtg

SEQ ID NO: 2267 - DNA, 663 bp, Artificial Sequence
  Synthetic polynucleotide encoding artificial human antibody VH chain
gaggtgcagctggtggagtctgggggaggcttggtccagcctggggggtccctgagactctcctgtgcagcctctggattcacctttagtagcaattggatgagctgggtccgccaggctccagggaaggggctggagtgggtggccaacataaaggaagatggaagtgagaaatactacgtggactctgtgaagggccgattcaccatttttagagacaacgccaagaactcactgtatctgcaaatgaacagcctgagagccgaggacacggctgtgtattactgtgcgagagtcccatctcgctatggccgttccaggggcgcttttgatatctggggccaagggacaatggtcaccgtctcttcagcctccaccaagggcccatcggtcttccccctggcaccctcctccaagagcacctctgggggcacagcggccctgggctgcctggtcaaggactacttccccgaaccggtgacggtgtcgtggaactcaggcgccctgaccagcggcgtgcacaccttcccggctgtcctacagtcctcaggactctactccctcagcagcgtggtgaccgtgccctccagcagcttgggcacccagacctacatctgcaacgtgaatcacaagcccagcaacaccaaggtggacaagagagtg

SEQ ID NO: 2268 - DNA, 656 bp, Artificial Sequence
  Synthetic polynucleotide encoding artificial human antibody VH chain
cccaggtgcagctgcaggagtcgggcccaggactggtgaagccttcacagaccctgtccctcacctgcactgtctctggtggctccatcagcagtggtggttactactggagctggatccgccagcacccagggaagggcctggagtggattgggtacatctattacagtgggagcacctactacaacccgtccctcaagagtctagttaccatatcagtagacacgtctaagaaccagttctccctgaagctgagctctgtgactgccgcggacacggccgtgtattactgtgcgagaaatctttatcgtctgggctggttcgacccctggggccagggaaccctggtcaccgtctcctcagcctccaccaagggcccatcggtcttccccctggcaccctcctccaagagcacctctgggggcacagcggccctgggctgcctggtcaaggactacttccccgaaccggtgacggtgtcgtggaactcaggcgccctgaccagcggcgtgcacaccttcccggctgtcctacagtcctcaggactctactccctcagcagcgtggtgaccgtgccctccagcagcttgggcacccagacctacatctgcaacgtgaatcacaagcccagcaacaccaaggtggacaagaaagtg

SEQ ID NO: 2269 - DNA, 654 bp, Artificial Sequence
  Synthetic polynucleotide encoding artificial human antibody VH chain
caggtgcagctggtggagtctgggggaggcgtggtccagcctgggaggtccctgagactctcctgtgcagcctctggattcacgttcagtagctatggcatgcactgggtccgtcaggctccaggcaaggggctggagtgggtggcaattatatcatatgatggaagtaataaatattatgcagactccgtgaagggccgattcaccatctccagagacaaatccaagaacacgctgtatctgcaaatgaacagcctgagagctgaggacacggctgtgtattactgtgcgaaatcgaaaggtaactaccgggacgctatggacgtctggggccaagggaccacggtcaccgtctcctcagcctccaccaagggcccatcggtcttccccctggcaccctcctccaagagcacctctgggggcacagcggccctgggctgcctggtcaaggactacttccccgaaccggtgacggtgtcgtggaactcaggcgccctgaccagcggcgtgcacaccttcccggctgtcctacagtcctcaggactctactccctcagcagcgtggtgaccgtgccctccagcagcttgggcacccagacctacatctgcaacgtgaatcacaagcccagcaacaccaaggtggacaagagagtt

SEQ ID NO: 2270 - DNA, 657 bp, Artificial Sequence
  Synthetic polynucleotide encoding artificial human antibody VH chain
caggtgcttctggtggagtctgggggcggcttggtcaagcctggagggtccctgagactctcctgtgcagcctctggattcaccttcagtgactactacatgagctggatccgccaggctccagggaaggggctggagtgggtttcatacattggtagtagtactactgccatatactacgcagactctgtgaagggccgattcaccatctcccgggacaacgccaggaactcgctgtatctgcaaatgaacagcctgcgagccgaggacacggccgtgtattactgtgcgacctcatatacagtaacgactttctacggtatggacgtctggggccaagggaccacggtcaccgtctcctcagcctccaccaagggcccatcggtcttccccctggcaccctcctccaagagcacctctgggggcacagcggccctgggctgcctggtcaaggactacttccccgaaccggtgacggtgtcgtggaactcaggcgccctgaccagcggcgtgcacaccttcccggctgtcctacagtcctcaggactctactccctcagcagcgtggtgaccgtgccctccagcagcttgggcacccagacctacatctgcaacgtgaatcacaagcccagcaacaccaaggtggacaagagagtg

SEQ ID NO: 2271 - DNA, 656 bp, Artificial Sequence
  Synthetic polynucleotide encoding artificial human antibody VH chain
cccaggtgcagctgcaggagtcgggcccagggctggtgaagccttcacagaccctgtccctcacctgcgctgtctctggtggctccatcagcagtggtggttacccctggagctggatccggcagccaccagggaagggactggagtggattgggtatatctcttacagtgggagcaccgactacaacccgtccctcaagagtcgagttaccatatcgctggacacgtccagtaaccagttctccctgaacctgtcctctctgaccgccgcggacacggccgtgtattactgtgccagaggggcggccttctactacggtatggacgtctggggccaagggaccacggtcaccgtctcctcagcctccaccaagggcccatcggtcttccccctggcaccctcctccaagagcacctctgggggcacagcggccctgggctgcctggtcaaggactacttccccgaaccggtgacggtgtcgtggaactcaggcgccctgaccagcggcgtgcacaccttcccggctgtcctacagtcctcaggactctactccctcagcagcgtggtgaccgtgccctccagcagcttgggcacccagacctacatctgcaacgtgaatcacaagcccagcaacaccaaggtggacaagagagtg

SEQ ID NO: 2272 - DNA, 657 bp, Artificial Sequence
  Synthetic polynucleotide encoding artificial human antibody VH chain
caggtgcagctgcaggagtcgggcccaggactggtgaagccttcggagaccctgtccctcacctgcactgtctctggtggctccatcagtatttactactggagctggatccggcagcccccagggaagggactggagtggattggatatatctattatagtgggagcaccaactacaacccctccctcaagagtcgagtcaccatatcagtagacacgtccaagaaccagttctccctgaagctgaggtctgtgaccgctgcggacacggccgtgtattactgtgcgagagatacctacggtgacccgaggggtgactactttgactactggggccagggaaccctggtcaccgtctcctcagcctccaccaagggcccatcggtcttccccctggcaccctcctccaagagcacctctgggggcacagcggccctgggctgcctggtcaaggactacttccccgaaccggtgacggtgtcgtggaactcaggcgccctgaccagcggcgtgcacaccttcccggctgtcctacagtcctcaggactctactccctcagcagcgtggtgaccgtgccctccagcagcttgggcacccagacctacatctgcaacgtgaatcacaagcccagcaacaccaaggtggacaagaaagtg

SEQ ID NO: 2273 - DNA, 370 bp, Artificial Sequence
  Synthetic polynucleotide encoding artificial human antibody VH chain
caggtgcagctacaggagtcgggcccaggactggtgaagccttcggagaccctgtccctcacctgcactgtcgctaatagctccatcagtagttactactggagctgggtccggcagcccccagggaaggcactggagtggattggatatatctcttattctgggagcaccaactacaacccctccctcaagagtcgagtcaccatgtcactagacacgcccaagagccagttctccctaaacctgagctctgtgaccggcgcagacacggccatatattactgtgcgagactgtggggtagcggtgactggtggccctccctgtattttgactcctggggccagggaaccctggtcaccgtctcctcag

SEQ ID NO: 2274 - DNA, 654 bp, Artificial Sequence
  Synthetic polynucleotide encoding artificial human antibody VH chain
gtggtgcagctggtggagtctgggggaggcttggtccagcctggggggtccctgagactctcctgtgcagcctctggattcacctttaatagctattggatgagctgggtccgccaggctccagggaaggggctggagtgggtggccaacataaagcaagatggaagtgagaaatactatgtggactctgtgaagggccgattcaccatctccagagacaacgccaagaactcactgtatctgcaaatgaacagcctgagagccgaggacacggctgtgtattactgtgcgagaatccggcgtatagcagcaactagttttgactactggggccagggaaccctggtcaccgtctcctcagcctccaccaagggcccatcggtcttccccctggcaccctcctccaagagcacctctgggggcacagcggccctgggctgcctggtcaaggactacttccccgaaccggtgacggtgtcgtggaactcaggcgccctgaccagcggcgtgcacaccttcccggctgtcctacagtcctcaggactctactccctcagcagcgtggtgaccgtgccctccagcagcttgggcacccagacctacatctgcaacgtgaatcacaagcccagcaacaccaaggtggacaagaatgtg

SEQ ID NO: 2275 - DNA, 675 bp, Artificial Sequence
  Synthetic polynucleotide encoding artificial human antibody VH chain
gaagtgcagctggtggagtctgggggaggcttggtacagcctggcaggtccctgagactctcctgtgcagcctctggattcacctttgatgattatgccatgcactgggtccggcaagctccagggaagggcctggagtgggtctcaggtattagttggaatagtggtagtataggctatgcggactctgtgaagggccgattcaccatctccagagacaacgccaagaactccctgtatctgcaaatgaacagtctgagagctgaggacacggccttgtattactgtgcaaaaatagcacgtcgtcctcccagtttttacgactacatggacgtctggggcaaagggaccacggtcaccgtctcctcagcatccccgaccagccccaaggtcttcccgctgagcctctgcagcacccagccagatgggaacgtggtcatcgcctgcctggtccagggcttcttcccccaggagccactcagtgtgacctggagcgaaagcggacagggcgtgaccgccagaaacttcccacccagccaggatgcctccggggacctgtacaccacgagcagccagctgaccctgccggccacacagtgcctagccggcaagtccgtgacatgccacgtgaagcactacacgaatcccagccaggatgtgactgtgccctgccca

SEQ ID NO: 2276 - DNA, 675 bp, Artificial Sequence
  Synthetic polynucleotide encoding artificial human antibody VH chain
gaggtgcagctggtgcagtctggagcagaggtgaaaaagccgggggagtctctgaagatctcctgtcagggttctggttacaggtttaacgcctactggatcggctgggtgcgccagatccccgggaaaggcctggagtggatggggatcatctatcctggtgactctgataccaaatacagcccatccttccaaggccaggtcaccatctcagccgacaagtccatcagcaccgcctacctgcagtggaacggcctggaggcctcggacaccgccgtctattactgtgcgaggtcgacaagtagttccacctccgacttccactacatggacgtatggggcaaggggaccacggtcaccatctcctcagcatccccgaccagccccaaggtcttcccgctgagcctctgcagcacccagccagatgggaacgtggtcatcgcctgcctggtccagggcttcttcccccaggagccactcagtgtgacctggagcgaaagcggacagggcgtgaccgccagaaacttcccacccagccaggatgcctccggggacctgtacaccacgagcagccagctgaccctgccggccacacagtgcctagccggcaagtccgtgacatgccacgtgaagcactacacgaatcccagccaggatgtgactgtgccctgccca

SEQ ID NO: 2277 - DNA, 654 bp, Artificial Sequence
  Synthetic polynucleotide encoding artificial human antibody VH chain
cacgtacaactgctacagtccggtccaggactggtgaagccctcgcagaccctctcactcacctgtgccatctccggggacagtgtctctagtaccagtggtgcttggaactggatcaggcagtccccatcgagaggccttgagtggctgggaaggacatactacaggtcccagtggatgaatgattatgcagaatctgtgagaagtcgaataaccatcaaccctgacacatccaagaaccaattctccctgcagttgaaatctgtgactcccgaggacacggctgtttattactgtacaagaggatgggcattcaccagctccgactggggccagggaacccaggtcaccgtctcctcagcctccaccaagggcccatcggtcttccccctggcgccctgctccaggagcacctccgagagcacagcggccctgggctgcctggtcaaggactacttccccgaaccggtgacggtgtcgtggaactcaggcgctctgaccagcggcgtgcacaccttcccagctgtcctacagtcctcaggactctactccctcagcagcgtggtgaccgtgccctccagcaacttcggcacccagacctacacctgcaacgtagatcacaagcccagcaacaccaaggtggacaagacagtg

SEQ ID NO: 2278 - DNA, 666 bp, Artificial Sequence
  Synthetic polynucleotide encoding artificial human antibody VH chain
cacgtacacctgcagcagtcaggtccaggactggtgacgccctcgcagaccctctcactcacctgtgccatctccggggacagtgtctctagcaacagtgctgcttggaactggatcaggcagtccccatcgagaggccttgagtggctgggaaggacatactacaggtccaagtggtataatgactatgcagtatctgtgaaaagtcgaataaccttcaaggcagacacgtccaagaaccagttctccctgcagctggactctgtgactcccgacgacacggctgtgtattactgtgcaggaggatgggcccttggctactggggccagggaaccctggtcaccgtctcctcagggagtgcatccgccccaacccttttccccctcgtctcctgtgagaattccccgtcggatacgagcagcgtggccgttggctgcctcgcacaggacttccttcccgactccatcactttctcctggaaatacaagaacaactctgacatcagcagcacccggggcttcccatcagtcctgagagggggcaagtacgcagccacctcacaggtgctgctgccttccaaggaggtcatgcagggcacagacgaacacgtggtgtgcaaagtccagcaccccaacggcaacaaagaaaagaacgtgcctcttcca

SEQ ID NO: 2279 - DNA, 349 bp, Artificial Sequence
  Synthetic polynucleotide encoding artificial human antibody VH chain
cccgtgcagctgcaggagtcgggcccaggactggtgaagccttcggagaccctgtccctcacctgcactgtctctggtggctccatcagtagttactactggagctggatccggcagcccccagggaagggactggagtggattgggtatctcttttacagtgggagcaccaactacaacccctccctcaagagtcgagtcaccatatcagtagacacgtccaagaaccagttctccctgaagttgggctctgtgaccgccgcagacacggccgtgtattactgtgcgagacaccgaattttcggtttggacgtctggggccaagggaccacggtcaccgtctcctcag

SEQ ID NO: 2280 - DNA, 691 bp, Artificial Sequence
  Synthetic polynucleotide encoding artificial human antibody VH chain
ctgtgccgaggtgcagctggtgcagtctggagcagaggtgaaaaagcccggggagtctctgaagatctcctgtaagggttctggatacagctttaccagctactggatcggctgggtgcgccagatgcccgggaaaggcctggagtggatggggatcatctatcctggtgactctgataccagatacagcccgtccttccaaggccaggtcaccatctcagccgacaagtccatcagcaccgcctacctgcagtggagcagcctgaaggcctcggacaccgccatgtattactgtgcgagacgcggaccgaccgatacatggtcaggggaagttggctactactttgactactggggccagggaaccctggtcaccgtctcctcagcatccccgaccagccccaaggtcttcccgctgagcctctgcagcacccagccagatgggaacgtggtcatcgcctgcctggtccagggcttcttcccccaggagccactcagtgtgacctggagcgaaagcggacagggcgtgaccgccagaaacttcccacccagccaggatgcctccggggacctgtacaccacgagcagccagctgaccctgccggccacacagtgcctagccggcaagtccgtgacatgccacgtgaagcactacacgaatcccagccaggatgtgactgtgccctgcccg

SEQ ID NO: 2281 - DNA, 669 bp, Artificial Sequence
  Synthetic polynucleotide encoding artificial human antibody VH chain
cagtgtcaggtgcagctggtggagtctgggggaggcgtggtccagcctgggaggtccctgagactctcctgtgcagcgtctggattcaccttcagtagctatggcatgcactgggtccgccaggctccaggcaaggggctggagtgggtggcagttatatggtatgatggaagtaataaatactatgcagactccgtgaagggccgattcaccatctccagagacaattccaagaacacgctgtatctgcaaatgaacagcctgagagccgaggacacggctgtgtattactgtgcgagagatggaaaaacattagggtacggtggtaactccgttgactactggggccagggaaccctggtcaccgtctcctcagcctccaccaagggcccatcggtcttccccctggcaccctcctccaagagcacctctgggggcacagcggccctgggctgcctggtcaaggactacttccccgaaccggtgacggtgtcgtggaactcaggcgccctgaccagcggcgtgcacaccttcccggctgtcctacagtcctcaggactctactccctcagcagcgtggtgaccgtgccctccagcagcttgggcacccagacctacatctgcaacgtgaatcacaagcccagcaacaccaaggtggacaagaaggtg

SEQ ID NO: 2282 - DNA, 672 bp, Artificial Sequence
  Synthetic polynucleotide encoding artificial human antibody VH chain
gaggtgcagctggtggagtctgggggaggcctggtcaagccgggggggtccctgagactctcctgtgcagtctctgggttcactttcagatcctacagcatgaactgggtccgccaggctccagggaaggggctggagtgggtctcatccattagtagcagtagtcgttacgtggactacgcagactcagtgaagggccgattcaccatctctagagacaacgccaagaacttactgtatctgcaaatgaacttcctgagagtcgaggacacggctgtgtattactgtgctcggacagaaactaaatgggaggacagggggctttgggactactggggccagggaaccctggtcaccgtctcctcagcatccccgaccagccccaaggtcttcccgctgagcctctgcagcacccagccagatgggaacgtggtcatcgcctgcctggtccagggcttcttcccccaggagccactcagtgtgacctggagcgaaagcggacagggcgtgaccgccagaaacttcccacccagccaggatgcctccggggacctgtacaccacgagcagccagctgaccctgccggccacacagtgcctagccggcaagtccgtgacatgccacgtgaagcactacacgaatcccagccaggatgtgactgtgccctgccca

SEQ ID NO: 2283 - DNA, 645 bp, Artificial Sequence
  Synthetic polynucleotide encoding artificial human antibody VH chain
caggtccagctggtgcaatctggggctgaggtgaagaagcctgggtcctcggtgaaggtctcctgcaagacttctggaggcaccttcagcagttatactatcagctgggtgcgacaggcccctggacaagggcctgagtggatgggaaggatcatccctatacttaatataacaaactacgcgcagaagttccagggcagagtcacgattaccgcggacaaatccacgagcacaacctacatggagatgggcagcctgagatctgaggacacggccgtgtatttctgtgcgagatcgttttatggttcaggtttgcagtggggccagggaaccctggtcaccgtctcctcagcctccaccaagggcccatcggtcttccccctggcaccctcctccaagagcacctctgggggcacagcggccctgggctgcctggtcaaggactacttccccgaaccggtgacggtgtcgtggaactcaggcgccctgaccagcggcgtgcacaccttcccggctgtcctacagtcctcaggactctactccctcagcagcgtggtgaccgtgccctccagcagcttgggcacccagacctacatctgcaacgtgaatcacaagcccagcaacaccaaggtggacaagagagtg

SEQ ID NO: 2284 - DNA, 654 bp, Artificial Sequence
  Synthetic polynucleotide encoding artificial human antibody VH chain
ggggtggacctggtggagtctgggggaggcctggtcaagcctggggggtccctgagactctcctgtgcagcctctggattcagcttcagcagatataatataaactgggttcggcaggctccagggaaggggctggagtgggtctcatccattagtagtactagcaattacatatactacgcggactctgtgaagggccggttcaccatctccagagacaacgccaagaactcactctatctgcaaatgaacagcctgagagccgaggacacggctgtgtattactgtgcgagggccatgggtggctacacttactaccttgacgactggggccagggaaccctggtcaccgtctcctcagcctccaccaagggcccatcggtcttccccctggcaccctcctccaagagcacctctgggggcacagcggccctgggctgcctggtcaaggactacttccccgaaccggtgacggtgtcgtggaactcaggcgccctgaccagcggcgtgcacaccttcccggctgtcctacagtcctcaggactctactccctcagcagcgtggtgaccgtgccctccagcagcttgggcacccagacctacatctgcaacgtgaatcacaagcccagcaacaccaaggtggacaagaaggtg

SEQ ID NO: 2285 - DNA, 666 bp, Artificial Sequence
  Synthetic polynucleotide encoding artificial human antibody VH chain
caggtgcagttggtggaatctgggggaggcgtggtccagcctgggaggtccctgagactctcctgtgcagcctctggattcaccttcactaattatgccatacactgggtccgccaggctccagacaaggggctggagtgggtgtcagttatttcatatgatggaagtgatgaatactacgcagactccgtgaagggccgattcaccatctccagagacaattccaagaacacggtttatctgcaaatgagcagcctgagagctgaggacacggctgtctatcgctgtgcgagggcggggaaagacggctacaattttttctactacggtatggacgtctggggccaagggaccacggtcagcgtctcctcaccctccaccaagggcccatcggtcttccccctggcaccctcctccaagagcacctctgggggcacagcggccctgggctgcctggtcaaggactacttccccgaaccggtgacggtgtcgtggaactcaggcgccctgaccagcggcgtgcacaccttcccggctgtcctacagtcctcaggactctactccctcagcagcgtggtgaccgtgccctccagcagcttgggcacccagacctacatctgcaacgtgaatcacaagcccagcaacaccaaggtggacaagaagttg

SEQ ID NO: 2286 - DNA, 660 bp, Artificial Sequence
  Synthetic polynucleotide encoding artificial human antibody VH chain
caggtgcagttggtggagtctgggggaggcgtggtccagcctgggaggtccctgagactctcgtgtgcagcgtctggattctccttcagtagttttggcatgcactgggtccgccaggctccaggcaaggggctggagtgggtggcagttatatggcatgatggaagtcataaatctcatgcagactccgtgaagggccgattcaccatctccagagacaattccaagaacacggtgtatctacaaatgaacagcctgggagccgaggacacggctgtatattactgtgcgagagggatcatgactacagcaatttcctactactttgactactggggccagggaaccctggtcaccgtctcctcagcctccaccaagggcccatcggtcttccccctggcaccctcctccaagagcacctctgggggcacagcggccctgggctgcctggtcaaggactacttccccgaaccggtgacggtgtcgtggaactcaggcgccctgaccagcggcgtgcacaccttcccggctgtcctacagtcctcaggactctactccctcagcagcgtggtgaccgtgccctccagcagcttgggcacccagacctacatctgcaacgtgaatcacaagcccagcaacaccaaggtggacaagagagtt

SEQ ID NO: 2287 - DNA, 376 bp, Artificial Sequence
  Synthetic polynucleotide encoding artificial human antibody VH chain
gaggtgcagctgttgcagtctgggggaggcttggtccagcctggggggtccctgagactctcctgtgcagcctctggattcacatttagctcgtatgccgtgacctgggtccgccaggctccagggaaggggctggagtgggtctcaacgattagtggtgatggtcgtagcacatatttcgcagactccgtgaagggccgtttcgccatctacagagacaattccaagaacacgctgtctctgctattgaacagcctgagagccgaggacacggccgtatattactgtgcgaaaggagaaagggacctgacagactacggtgaccccgaatatttccagcactggggccagggcaccctggtcaccgtctcctcag

SEQ ID NO: 2288 - DNA, 376 bp, Artificial Sequence
  Synthetic polynucleotide encoding artificial human antibody VH chain
caggtgcaagtggtggagtctgggggaggcgtggtccagcctgggaggtccctgagactctcctgtgtagcctctggattcaccttcagtagtcatggcatgcactgggtccgccaggctccaggcaaggggctggagtgggtggcggttatatcagatgatggaaaaaataaatactatggagactccgtgcagggccgatttgtcatctccagagacaattccaagaacacgatatatctacagatgtacgacctgagggctgaggacacggctgtctattactgtgcgaaagatctgcgatattgtagcgctcgtagtagttgttttggcattgacttctggggccagggaaccctagtcaccgtctcctcag

SEQ ID NO: 2289 - DNA, 642 bp, Artificial Sequence
  Synthetic polynucleotide encoding artificial human antibody VH chain
gtggtgcaactggtggagtctgggggaggcttggtccagcctggggggtccctgagactctcctgtgcagcctctggattcagctttagtacctattggatgagctgggtccgccaggctccagggaaggggctagagtgggtggccaacataaagcaagatgggagtgagaaacactatgtggactctgtgaagggccgattcaccatctccagagacaacgccaagaactcactgtatctgcaaatgaatagcctgagagccgaggacacggctatgtattattgtgcgagaagagcatacagctttgactactggggccagggaaccttggtcaccgtctcctcagcctccaccaagggcccatcggtcttccccctggcaccctcctccaagagcacctctgggggcacagcggccctgggctgcctggtcaaggactacttccccgaaccggtgacggtgtcgtggaactcaggcgccctgaccagcggcgtgcacaccttcccggctgtcctacagtcctcaggactctactccctcagcagcgtggtgaccgtgccctccagcagcttgggcacccagacctacatctgcaacgtgaatcacaagcccagcaacaccaaggtggacaagagtgag

SEQ ID NO: 2290 - DNA, 669 bp, Artificial Sequence
  Synthetic polynucleotide encoding artificial human antibody VH chain
gaggtgcagctggtggagtccgggggaggcttagttcagcctggggggtccctgagactctcctgtgcagcctctggattcaccttcaataactactggatgcactgggtccgccaagctccagggaagggactggtgtgggtctcacgtatttccagtgatgggagtaccacagcctccgcggactccgtgaagggccgattcaccatctccagagacaacgccaagaacacactatttctccaaatgaacagtctgagagccgaggacacggctgtgtattattgtgcaagagagggggccccagatgactacggtgactccgggactgcttttgatatttggggccaagggacaacggtcaccgtctcttcagcctccaccaagggcccatcggtcttccccctggcaccctcctccaagagcacctctgggggcacagcggccctgggctgcctggtcaaggactacttccccgaaccggtgacggtgtcgtggaactcaggcgccctgaccagcggcgtgcacaccttcccggctgtcctacagtcctcaggactctactccctcagcagcgtggtgaccgtgccctccagcagcttgggcacccagacctacatctgcaacgtgaatcacaagcccagcaacaccaaggtggacaagaaggtg

SEQ ID NO: 2291 - DNA, 659 bp, Artificial Sequence
  Synthetic polynucleotide encoding artificial human antibody VH chain
gcgaggtgcacctggtgcagtctgggggaggcttggtaaagcctggggggtcccttagactctcctgtgcagcctctggatttactttcagtcacggctggatgagctgggtccgccaggctccagggaagggactggagtgggttgcccgtattaggagcaaaaccgatggtgggactacagactacgctgctcccgtgaatggcagattcaccatctccagagacatttctattgagactctgtatttgcaaatggacagcctgaaaaccgaggacacagccgtctattactgtaccaccgatcacccctatggtgactactctgacaactggggccagggagtcctggtcaccgtctcctcagcctccaccaagggcccatcggtcttccccctggcaccctcctccaagagcacctctgggggcacagcggccctgggctgcctggtcaaggactacttccccgaaccggtgacggtgtcgtggaactcaggcgccctgaccagcggcgtgcacaccttcccggctgtcctacagtcctcaggactctactccctcagcagcgtggtgaccgtgccctccagcagcttgggcacccagacctacatctgcaacgtgaatcacaagcccagcaacaccaaggtggacaagagtgag

SEQ ID NO: 2292 - DNA, 656 bp, Artificial Sequence
  Synthetic polynucleotide encoding artificial human antibody VH chain
cccaggtgcagctgcaggagtcgggcccaggactggtgaagccttcggagaccctgtccctcacctgcactgtctccggtggctccatcagaaatgactactggagttggatccggcagtccccggggaagggactggagtggattgggtacatctctgacattggggacaccaactacaacccctctttcaagagtcgaatctccatatcactggacacgtccaagaaccagttctccctgaagctgaactctgtgaccgctgcggacacggccgtctattactgtgcgaaggaattattagggggttttgactattggggccagggaacccttgtcgccgtctccacagcatccccgaccagccccaaggtcttcccgctgagcctctgcagcacccagccagatgggaacgtggtcatcgcctgcctggtccagggcttcttcccccaggagccactcagtgtgacctggagcgaaagcggacagggcgtgaccgccagaaacttcccacccagccaggatgcctccggggacctgtacaccacgagcagccagctgaccctgccggccacacagtgcctagccggcaagtccgtgacatgccacgtgaagcactacacgaatcccagccaggatgtgactgtgccctgcccg

SEQ ID NO: 2293 - DNA, 656 bp, Artificial Sequence
  Synthetic polynucleotide encoding artificial human antibody VH chain
cccaggtgcagctggtgcagtctggggctgaggtgaagaagcctgggtcctcggtgaaggtctcctgcaaggcttctggaggcaccttcagcagctatgctatcagctgggtgcgacaggcccctggacaagggcttgagtggatgggagggatcatccccatctttggtacagcaaactacgcacagaagttccagggcagagtcacgattaccgcggacgaatccacgagcacagcctacatggagctgagcagcctgagatctgaggacacggccgtgtattactgtgcgagagtttttggatcagcagctggtgcttttgatatctggggccaagggacaatggtcaccgtctcttcagcctccaccaagggcccatcggtcttccccctggcaccctcctccaagagcacctctgggggcacagcggccctgggctgcctggtcaaggactacttccccgaaccggtgacggtgtcgtggaactcaggcgccctgaccagcggcgtgcacaccttcccggctgtcctacagtcctcaggactctactccctcagcagcgtggtgaccgtgccctccagcagcttgggcacccagacctacatctgcaacgtgaatcacaagcccagcaacaccaaggtggacaagagtgag

SEQ ID NO: 2294 - DNA, 654 bp, Artificial Sequence
  Synthetic polynucleotide encoding artificial human antibody VH chain
cccctgcagctgcatgagtcgggcccaggactggtgaagccttcggagaccctgtccctcacctgctctgtctctggtggctccatcagcagtagtaattacttctggggctggatccgccagtccccagggatggggctggagtggattgggagtatctattttagtgggaaaactcactacaacccgtcgctcaagagtcgagtcaccatatccgtagatacgtccaagaatcacttctccctgaagctgagctctgtgaccgccgcagacacggctgttttcttctgtgcgagacacgattggcgcttatacgcatttgactactggggcctcggaaccctggtcaccgtctcctcagcctccaccaagggcccatcggtcttccccctggcaccctcctccaagagcacctctgggggcacagcggccctgggctgcctggtcaaggactacttccccgaaccggtgacggtgtcgtggaactcaggcgccctgaccagcggcgtgcacaccttcccggctgtcctacagtcctcaggactctactccctcagcagcgtggtgaccgtgccctccagcagcttgggcacccagacctacatctgcaacgtgaatcacaagcccagcaacaccaaggtggacaagagtgag

SEQ ID NO: 2295 - DNA, 660 bp, Artificial Sequence
  Synthetic polynucleotide encoding artificial human antibody VH chain
gtggtgcagctggtggagtccgggggaggcttagttcagcctggggggtccctgagactctcctgtgcaggctctggatttaccttcagtgactactggatgcactgggtccgccaagctccagggaaggggctggtgtgggtctcaactattaatcgtgatgggagttacacaaaccacgcggactccgtgaagggccgattcaccatctccagagacaacgccaggagcacgctgtttctgcaaatgagcagtctcagagtcgaggacacggctgtgtattactgtgcaggaggggaaaccagtcctgactactggggccagggaaccctggtcaccgtctcctcagggagtgcatccgccccaacccttttccccctcgtctcctgtgagaattccccgtcggatacgagcagcgtggccgttggctgcctcgcacaggacttccttcccgactccatcactttctcctggaaatacaagaacaactctgacatcagcagcacccggggcttcccatcagtcctgagagggggcaagtacgcagccacctcacaggtgctgctgccttccaaggacgtcatgcagggcacagacgaacacgtggtgtgcaaagtccagcaccccaacggcaacaaagaaaagaacgtgcctcttcca

SEQ ID NO: 2296 - DNA, 665 bp, Artificial Sequence
  Synthetic polynucleotide encoding artificial human antibody VH chain
cccaactgcagctgcaggagtcgggcccaggactggtgaagccttcggagaccctgtccctcacctgcactgtctctgatgtctccatcatcagtagtttctattactggggctggatccgccagccccccgggaaggggctagagtggattgggagtgtctattatagtgggagcacctcctacaacccgtccctgaagagccgcgtcaccatatccgcagacacgtccaaggcacatttctccctgaacctgaggtctgtgaccgccgcagacacggctgtttattattgtgtgagtagggggcccctagggggagcagcagctggaccggactactggggccagggagcccttgtcatcgtctcctcagcctccaccaagggcccatcggtcttccccctggcaccctcctccaagagcacctctgggggcacagcggccctgggctgcctggtcaaggactacttccccgaaccggtgacggtgtcgtggaactcaggcgccctgaccagcggcgtgcacaccttcccggctgtcctacagtcctcaggactctactccctcagcagcgtggtgaccgtgccctccagcagcttgggcacccagacctacatctgcaacgtgaatcacaagcccagcaacaccaaggtggacaagagagtt

SEQ ID NO: 2297 - DNA, 648 bp, Artificial Sequence
  Synthetic polynucleotide encoding artificial human antibody VH chain
caggtgcggctgcaggagtcgggcccaggactggtgaagccttcacagaccctgtccctcacctgcactgtctctggtgcctccgtttccagtggttcttactactgggcttgggtccggcagtccgccgcgaagggactggagtggattgggcgtgtgtctcccagcgggactaacaactacaacaccgcgctgaagagccgggtcaccatatccctggacacggcgaggaaccagttctccctgacagtgacctctgtgaccgccgaagacacggccatctattactgtgcgcgagatgtccgagggtggttcgtcccctggggccagggtagcctggtcaccgtctcctcagcctccaccaagggcccatcggtcttccccctggcaccctcctccaagagcacctctgggggcacagcggccctgggctgcctggtcaaggactacttccccgaaccggtgacggtgtcgtggaactcaggcgccctgaccagcggcgtgcacaccttcccggctgtcctacagtcctcaggactctactccctcagcagcgtggtgaccgtgccctccagcagcttgggcacccagacctacatctgcaacgtgaatcacaagcccagcaacaccaaggtggacaagagtgag

SEQ ID NO: 2298 - DNA, 672 bp, Artificial Sequence
  Synthetic polynucleotide encoding artificial human antibody VH chain
cccgtccagttggtgcagtctggggctgtggtgaagaagcctgggtcctcggtgaaagtctcctgcaaagcttctggaggcaccttcagcggctatggcatcaattgggtgcgacaggcccctggacaagggcttgagtggatgggaaggatcatccctattgttggagaagcaaactacgcacagaagttccagggcagagtcacaattaacgcggacaagtccacgagcacagccacattggaagtgaggagcctgagatctgaggacacggccgtctattactgtgtgagagatcgcaacattgtatctgtgccaggtgctatcccctacggaatggacgtctggggccaggggaccacggtcaccgtctcctcagcttccaccaagggcccatcggtcttccccctggcgccctgctccaggagcacctctgggggcacagcggccctgggctgcctggtcaaggactacttccccgaaccggtgacggtgtcgtggaactcaggcgccctgaccagcggcgtgcacaccttcccggctgtcctacagtcctcaggactctactccctcagcagcgtggtgaccgtgccctccagcagcttgggcacccagacctacacctgcaacgtgaatcacaagcccagcaacaccaaggtggacaagagagtt

SEQ ID NO: 2299 - DNA, 349 bp, Artificial Sequence
  Synthetic polynucleotide encoding artificial human antibody VH chain
gtggtgcagctggtggagtccgggggaggcttagttcagcctggggggtccctgagactctcctgtgcagcctctggattcaccttcagtagctactggatgcactgggtccgccaagctccagggaaggggctggtgtgggtctcacgtattaatagtgatgggagtagcacaagctacgcggactccgtgaagggccgattcaccatctccagagacaacgccaagaacacgctgtatctgcaaatgaacagtctgagagccgaggacacggctgtgtattactgtgcaagagggagtgacacccttgactactggggccagggaaccctggtcaccgtctcctcag

SEQ ID NO: 2300 - DNA, 656 bp, Artificial Sequence
  Synthetic polynucleotide encoding artificial human antibody VH chain
cccaggtgcagctgcaggagtcgggcccaggactgctgaagccttcacagaccctgtccctcagctgcactgtctctggtggctccatcagcagtggagattactactggagttggatccgccagcccccagggaagggcctggaatggattgggtacatctattacaatgggagcacctactacagttcgtccctcaggagtcgacttaccatatcagtggacacgtccaagaaccagttctccctgaagctgagctctgtgactgccgcagacacggccgcgtattactgtgccagagtggggctaacttttgccttgttcgacccctggggccagggaaccctggtcaccgtctcctcagcctccaccaagggcccatcggtcttccccctggcgccctgctccaggagcacctccgagagcacagcggccctgggctgcctggtcaaggactacttccccgaaccggtgacggtgtcgtggaactcaggcgccctgaccagcggcgtgcacaccttcccggctgtcctacagtcctcaggactctactccctcagcagcgtggtgaccgtgccctccagcagcttgggcacgaagacctacacctgcaatgtagatcacaagcccagcaacaccaaggtggacaagagagtt

SEQ ID NO: 2301 - DNA, 666 bp, Artificial Sequence
  Synthetic polynucleotide encoding artificial human antibody VH chain
gtggtgcagctgttggagtctgggggaggcttggtacagcctggggggtccctgagactctcctgtgcagcctctggattcacctttagcagctatgccataaactgggtccgccaggctccagggaaggggctggagtgggtctcagctattagtggtagtggtggtagcacatactacgcagactccgtgaagggccggttcaccatctccagagacaattccaagaacacgctgtatctgcaaatgaacagcctgagagccgaggacacggccgtatattactgtgcgaacagtgcggggatacagctatggtcctcagacaactggttcgacccctggggccagggaaccctggtcaccgtctcctcagcctccaccaagggcccatcggtcttccccctggcaccctcctccaagagcacctctgggggcacagcggccctgggctgcctggtcaaggactacttccccgaaccggtgacggtgtcgtggaactcaggcgccctgaccagcggcgtgcacaccttcccggctgtcctacagtcctcaggactctactccctcagcagcgtggtgaccgtgccctccagcagcttgggcacccagacctacatctgcaacgtgaatcacaagcccagcaacaccaaggtggacaagagtgag

SEQ ID NO: 2302 - DNA, 657 bp, Artificial Sequence
  Synthetic polynucleotide encoding artificial human antibody VH chain
gaggtgcagctgttggagtctgggggaggcttggtgcagcctggggggtccctgagactctcctgtgcagcctctggattcacctttagcagctatgccatgagctgggtccgccaggctccagggaaggggctggagtgggtctcagccattagtgccagtggtcgtaccacatactacgcagactctttcaagggccggttcaccatctccagagacaattccaagaacacgctatatttgcaaatgagcagactgagaggcgacgacgcggccgtttattactgtgcgaaagagggcatagaactcatgatcctctggggccagggaaccctggtcaccgtctcctcaacatccccgaccagccccaaggtcttcccgctgagcctctgcagcacccagccagatgggaacgtggtcatcgcctgcctggtccagggcttcttcccccaggagccactcagtgtgacctggagcgaaagcggacagggcgtgaccgccagaaacttcccacccagccaggatgcctccggggacctgtacaccacgagcagccagctgaccctgccggccacacagtgcctagccggcaagtccgtgacatgccacgtgaagcactacacgaatcccagccaggatgtgactgtgccctgcccg

SEQ ID NO: 2303 - DNA, 669 bp, Artificial Sequence
  Synthetic polynucleotide encoding artificial human antibody VH chain
gtggtccagttggtggagtctgggggagccttggtccagcctggggggtccctgagactctcctgtgcagcctctggattcaccttgagcagctatgctatgtactgggtccgccaggctccagggaagggacttgaatatgtttcagctattactgctaatgggggtagcacatattatgcaaattctgtgaagggcagattcaccgtctccagagacaattccaagaaaacggtttatcttcaattgggcagcctgagagctgaggacacggctgtctattactgtgcgagaggcattaccctgactcggggagtctcctttgactactggggccagggaaccctggtcaccgtctccccagcatccccgaccagccccaaggtcttcccgctgagcctctgcagcacccagccagatgggaacgtggtcatcgcctgcctggtccagggcttcttcccccaggagccactcagtgtgacctggagcgaaagcggacagggcgtgaccgccagaaacttcccacccagccaggatgcctccggggacctgtacaccacgagcagccagctgaccctgccggccacacagtgcctagccggcaagtccgtgacatgccacgtgaagcactacacgaatcccagccaggatgtgactgtgccctgcccg

SEQ ID NO: 2304 - DNA, 352 bp, Artificial Sequence
  Synthetic polynucleotide encoding artificial human antibody VH chain
cccctgcagctgcaggagtccggctcaggactggtgaagccttcacagaccctgtccctcacctgcgctgtttcaggtggctccatcagcagtggtggttactcctggagctggatccggcagccaccagggaagggcctggagtggcttgggtacatctatcatagggggacctcctactacaacccgtccctcaagagtcgagtcaccatatcactagacatgtccaagaaccagctctccctgaagctgacctctgtgaccgccgcggacacggccgtgtattactgtgccagagatgggggagcttttgatatctggggccaagggacattggtcaccgtctcttcag

SEQ ID NO: 2305 - DNA, 663 bp, Artificial Sequence
  Synthetic polynucleotide encoding artificial human antibody VH chain
caggtgcacctggtggagtctgggggaggcgtggtccagcctgggaggtccctgagactctcctgtgcagcctctggattcaccttcagtaactctgctatgcactgggtccgccaggctccaggcaaggggctggattgggtgtcagttatctcatttgatggaagcaatcaatattatgcagactccgtgaagggccgattcaccatctccagagacaattccaagaacacgctgtttctgcaaatgaacagcctgagagctgaggacacggctgtatattactgtgcgagagatcggcttttcacagctattaacagtgggtactttgactactggggccagggaaccctggtcaccgtctcctcagcctccaccaagggcccatcggtcttccccctggcaccctcctccaagagcacctctgggggcacagcggccctgggctgcctggtcaaggactacttccccgaaccggtgacggtgtcgtggaactcaggcgccctgaccagcggcgtgcacaccttcccggctgtcctacagtcctcaggactctactccctcagcagcgtggtgaccgtgccctccagcagcttgggcacccagacctacatctgcaacgtgaatcacaagcccagcaacaccaaggtggacaagagtgag

SEQ ID NO: 2306 - DNA, 355 bp, Artificial Sequence
  Synthetic polynucleotide encoding artificial human antibody VH chain
caggtgcagctggtgcagcctgggggtgaggtgaagaagcctggggcctcagtgaagatttcctgcaaggcatctggatacaccttcaccagtcactatatgcactgggtacgacaggcccctggacaagggctagagtggatgggaatgatcgaccctagtggcggcagcagaacctacgcacagaagttccagggcagagtcaccatgaccagggacacgtccacgagcacagtctacatggagctgagcagcctgagatctgacgacacggccgtttattactgtgcgagagaggggagctactacgggattggctactggggccagggaaccctggtcaccgtctcctcag

SEQ ID NO: 2307 - DNA, 364 bp, Artificial Sequence
  Synthetic polynucleotide encoding artificial human antibody VH chain
gaggtgcaattggtggagtctgggggagtcgtggtgcagcctggggggtccctgagactctcctgtgcagcctctggattcaccttcagcgcctactggatgcactgggtccgccaagctccagggaaggggctggtgtgggtctcacgtattaatactgatgggagtagcacaagctacgcggactccgtgaagggccgattcaccatctccagagacaacgccaagaactcactgtatctgcaaatgaacagcctgagagccgaggacacggccgtgtattactgtgcgagagatacggacagtggctggttggattcgtttgactactggggccagggaaccctggtcaccgtctcctcag

SEQ ID NO: 2308 - DNA, 385 bp, Artificial Sequence
  Synthetic polynucleotide encoding artificial human antibody VH chain
cagggccaactggttcagtctggggctgaggtgaagaaggctggggcctcagtgaaggtctcctgcaaggtttccggatactccctcactgaaatctccatgcactgggtgcgacaggctcctggaaaagggcttgagtgggtgggaggttttgatcctgaaggtggtgaaacaatctacgcacagaagttccagggcagagtctccatgacctgggacacgtctatagaccttgcctacatggagctgagaagtctgagttctgacgacacggccctgtattactgtgcgacagatcaggggtgtgatgatggcagctgctatgtaggccactactacggaatggacgtctggggccaagggaccaaggtcaccgtctcttcag

SEQ ID NO: 2309 - DNA, 648 bp, Artificial Sequence
  Synthetic polynucleotide encoding artificial human antibody VH chain
cccctgcagctgcaggagtcgggcccaggactggtgaagccttcggagaccctgtccctcacctgcagtgtctctggtggctccatcaggagcagtgctcccttctggggctggatccgccagcccccagggaaggggctggagtggattggaaacatctattataatggagacacctcctacagcccgtccctcgagaatcgagtcaccttattcgtagacacgtccaagaaccagttctccctcaacctgacctctgtgaccgccgcggacacggccgtatattactgtgggaggattatgactccctcgattgacctctggggccagggaaagttggtcaccgtctcctcagcatccccgaccagccccaaggtcttccccctggcaccctcctccaagagcacctctgggggcacagcggccctgggctgcctggtcaaggactacttccccgaaccggtgacggtgtcgtggaactcaggcgccctgaccagcggcgtgcacaccttcccggctgtcctacagtcctcaggactctactccctcagcagcgtggtgaccgtgccctccagcagcttgggcacccagacctacatctgcaacgtgaatcacaagcccagcaacaccaaggtggacaagaatgag

SEQ ID NO: 2310 - DNA, 656 bp, Artificial Sequence
  Synthetic polynucleotide encoding artificial human antibody VH chain
cccaggttcagctggtgcagtctggagctgaggtgaagaagcctggggcctcagtgaaggtctcctgcaaggcttctggttacatctttaccacctatgttatcagctgggtgcgacaggcccctggacaagggcttgagtggatgggatggatcagcgcttacactggtaacacaaactatccacagaaattccagggcagagtcaccatgaccacagacacagccacgagcacagcctacatggagctgaagagcctgagatctgacgacacggccgtgtattactgtgcgagagaaggacgggggggaggagacttctttgactactggggccagggaaccctggtcaccgtctcctcagcctccaccaagggcccatcggtcttccccctggcaccctcctccaagagcacctctgggggcacagcggccctgggctgcctggtcaaggactacttccccgaaccggtgacggtgtcgtggaactcaggcgccctgaccagcggcgtgcacaccttcccggctgtcctacagtcctcaggactctactccctcagcagcgtggtgaccgtgccctccagcagcttgggcacccagacctacatctgcaacgtgaatcacaagcccagcaacaccaaggtggacaagaatgtg

SEQ ID NO: 2311 - DNA, 660 bp, Artificial Sequence
  Synthetic polynucleotide encoding artificial human antibody VH chain
taagtgcagctggtggagtctgggggaggcttggtacagcctggcaggtccctgagactctcctgtgcagcctctggattcacgtttgatgattatgccatgcactgggtccggcaagctccagggaagggcctggagtgggtctcaggtattatttggaatagtggtacgacaggctatgcggactctgtgaagggccgattcaccatctccagagacaacgccaagaaatccctgtatctgcaaatgaacagtctgagaactgaggacacggccctgtattactgtgcaaaagatggggacagtttgggggatttctctacttttgatatctggggccatgggaccatggtcaccgtctcctcagcctccaccaagggcccatcggtcttccccctggcaccctcctccaagagcacctctgggggcacagcggccctgggctgcctggtcaaggactacttccccgaaccggtgacggtgtcgtggaactcaggcgccctgaccagcggcgtgcacaccttcccggctgtcctacagtcctcaggactctactccctcagcagcgtggtgaccgtgccctccagcagcttgggcacccagacctacatctgcaacgtgaatcacaagcccagcaacaccaaggtggacaagaatgtg

SEQ ID NO: 2312 - DNA, 653 bp, Artificial Sequence
  Synthetic polynucleotide encoding artificial human antibody VH chain
gcgaggtgcagttggtggagtccgggggaggcttagttcagacgggggggtccctgagactctcctgttcagcctctggattcaccttcaataattactggatgcactgggtccgccaagctccgggaaaggggctgctgtggctctcgcgaataaatactgatggtagtcgaggacactacgacgactccgtgcagggccgatttaccatctccagagacaacgccaagcaaacggtctatctgcaaatggacgggctgagagccgaggacacggctgtctatttttgtgcaagagacggctatgactttcgggcttttgaccactggggccagggagtcctggtcaccgtctcctcagcctccaccaagggcccatcggtcttccccctggcaccctcctccaagagcacctctgggggcacagcggccctgggctgcctggtcaaggactacttccccgaaccggtgacggtgtcgtggaactcaggcgccctgaccagcggcgtgcacaccttcccggctgtcctacagtcctcaggactctactccctcagcagcgtggtgaccgtgccctccagcagcttgggcacccagacctacatctgcaacgtgaatcacaagcccagcaacaccaaggtggacaagaaggtg

SEQ ID NO: 2313 - DNA, 674 bp, Artificial Sequence
  Synthetic polynucleotide encoding artificial human antibody VH chain
cccaggtgcagctgctggagtcgggcccaggagtggtgaagccttcggagaccctgtctctcacctgctctgtctccggtgactccgtcagtagtttctactggacgtggatccggcaacccccagggaagggaccggagtggattggtaatatttatcacagtggcagcaccaacttcaatccctccctcaagagtcgagtcaccatatcactcgacatgtccaagaaccagttctccctgcacctaaagtctgtgaccgctgcggacactgccgtctattactgtgcgcgagctcgcggtgggggtttttgtagtaatatggactgcccggcaatgtttgactactggggccggggaaccctggtcaccgtctccgcagcctccaccaagggcccatcggtcttccccctggcaccctcctccaagagcacctctgggggcacagcggccctgggctgcctggtcaaggactacttccccgaaccggtgacggtgtcgtggaactcaggcgccctgaccagcggcgtgcacaccttcccggctgtcctacagtcctcaggactctactccctcagcagcgtggtgaccgtgccctccagcagcttgggcacccagacctacatctgcaacgtgaatcacaagcccagcaacaccaaggtggacaagagtgag

SEQ ID NO: 2314 - DNA, 364 bp, Artificial Sequence
  Synthetic polynucleotide encoding artificial human antibody VH chain
gaggtgcagttggtggagtccgggggaggctcggtaaagcctggggggtcccttagactctcctgtgtagccggtggatataattttaatgatgatcggatgagctcgatgaactgggtccgccaggctccagggaaggggctggagtgggttggccgtattaaaagtaaaagtgatggtgggtcaacaaactacgctgcacccgtgcaaggcagattcaccatctcaagagatgattcgaaaaacactctgtatctccaaatgaacagcctgaaaatcgaggacacagccgtgtattattgtaccacgattcatgactacggtgaccactggggccagggaaccctggtcaccgtctcctcag

SEQ ID NO: 2315 - DNA, 642 bp, Artificial Sequence
  Synthetic polynucleotide encoding artificial human antibody VH chain
gaggtgcaactggtggagtctgggggagccttggtccagcctggggggtccctgagaatttcctgtgcagcctctggattcaccgtcagtaccaactacatgagctgggtccgccaggctccagggaaggaactggagtggatctcagttatttatagcggtggtaccacatactacgcagcccccgtgaagggcagattcaccatctccagagacgattccaagaacacactgtatcttcaaatgaacagtctgagagtcgaggacacggctgtatatcactgtgcgaggggccttttacgatccctggacgtctggggccaagggaccacggtcaccgtctcctcagcctccaccaagggcccatcggtcttccccctggcgccctgctccaggagcacctccgagagcacagcggccctgggctgcctggtcaaggactacttccccgaaccggtgacggtgtcgtggaactcaggcgctctgaccagcggcgtgcacaccttcccggctgtcctacagtcctcaggactctactccctcagcagcgtggtgaccgtgacctccagcaacttcggcacccagacctacacctgcaacgtagatcacaagcccagcaacaccaaggtggacaagacagtg

SEQ ID NO: 2316 - DNA, 677 bp, Artificial Sequence
  Synthetic polynucleotide encoding artificial human antibody VH chain
gtgaggtgcacctggtggagtctgggggaggcttcgtccagcctggagggtccctgagactctcctgtgcagcctctggattcacgttcagtgaccactacatggactgggtccgccaggctccagggaaggggctggagtgggttggccgtattaaaaacagagctaacagttacaacacagagtacgccgcgtctgtgagaggcagattcaccatctcaagagatgattcaaacaactcactgtttctgcaaatgaacagcctgacagccgaggacacggccgtatattactgtgctagagtgaaactgggggcatcgagccgtgtttttgatgtctggggccaagggacaatggtcaccgtctcttcagcatccccgaccagccccaaggtcttcccgctgagcctctgcagcacccagccagatgggaacgtggtcatcgcctgcctggtccagggcttcttcccccaggagccactcagtgtgacctggagcgaaagcggacagggcgtgaccgccagaaacttcccacccagccaggatgcctccggggacctgtacaccacgagcagccagctgaccctgccggccacacagtgcctagccggcaagtccgtgacatgccacgtgaagcactacacgaatcccagccaggatgtgactgtgccctgccca

SEQ ID NO: 2317 - DNA, 361 bp, Artificial Sequence
  Synthetic polynucleotide encoding artificial human antibody VH chain
caggtccagctggtggagtctgggggaggcgtggtccagcctgggaggtccctgagactctcctgtgcagcctctggattcaccttccgtgattatggcatgcactgggtccgccaggccccaggccaggggctacagtgggtggcagttatatcttttgatggaagtgataaattctatgcagactccgtgaagggccggttcagcatctccagagacaattccagggacacggtgtatctgcaaatgaaccgcctaagacctgaagacacggctgtatattactgtgcgacaaccgttacacctaaggtgaccagttttgcttcctggggccagggaagcctggtcaccgtctccgcat

SEQ ID NO: 2318 - DNA, 664 bp, Artificial Sequence
  Synthetic polynucleotide encoding artificial human antibody VH chain
gtgtgaggtgcagctggtggagtcggggggaggcctggtcaagcccggggggtccctcagactctcctgtgcagcctctggattcgacatcaggagttataccatacactgggtccgccaggctccagggaaggggctggagtgggtctcatccattactgctggtggaagtttcataaactacgcagactcggtaaagggccgattcaccatctccagagacaacgcccagaactcactttttctgcaagtggaccgcctgagagccgaggacacggctctttatttttgtgcgagagaacagagccccctttatttcggtccatctttggacgtctggggccaagggacctcggtcatcgtctccttagcctccaccaagggcccatcggtcttccccctggcaccctcctccaagagcacctctgggggcacagcggccctgggctgcctggtcaaggactacttccccgaaccggtgacggtgtcgtggaactcaggcgccctgaccagcggcgtgcacaccttcccggctgtcctacagtcctcaggactctactccctcagcagcgtggtgaccgtgccctccagcagcttgggcacccagacctacatctgcaacgtgaatcacaagcccagcaacaccaaggtggacaagagtgag

SEQ ID NO: 2319 - DNA, 651 bp, Artificial Sequence
  Synthetic polynucleotide encoding artificial human antibody VH chain
caggtgcagctggtgcagtctggggctgaggtgaagaaccctggggcctcagtgaaggtctcctgcaaggcttctggatacaccttcaccgactactatatccactgggtgcgacaggcccctggacaagggcttgagtggatgggatggatcaaccctaatagtggtggcacaaatcatgcacagaagtttcagggcagggtcaccatgaccagggacatgtccatcaacacagcctacatggaggtgagcgggctgagatctgacgacacggccatctattactgtgcgagagagccttactcctcctacgctatggacgtctggggccaagggaccacggtcaccgtctcctcagcctccaccaagggcccatcggtcttccccctggcaccctcctccaagagcacctctgggggcacagcagccctgggctgcctggtcaaggactacttccccgaaccggtgacggtgtcgtggaactcaggcgccctgaccagcggcgtgcacaccttcccggctgtcctacagtcctcaggactctactccctcagcagcgtggtgaccgtgccctccagcagcttgggcacccagacctacatctgcaacgtgaatcacaagcccagcaacaccaaggtggacaagaaggtg

SEQ ID NO: 2320 - DNA, 655 bp, Artificial Sequence
  Synthetic polynucleotide encoding artificial human antibody VH chain
gtgtgaggtgcagctgttggagtcggggggaggcttggtacagcctggggggtccctgagactctcctgtgcagcctctggattcacctttagcaactatgccatgagttgggtccgccaggctccagggaaggggctgaagtgggtctcaagtattagttatagtggtggtagcacatactacgcagactccgtgaagggccgggtcaccatctccagagacaattccaagaacacgctgtatctgcaaatgaacagcctgagagccgaggacacggccgtatattactgtgcgaaagatggatccgagatgttattgtgtgactactggggccagggaaccctggtcaccgtctcctcagcctccaccaagggcccatcggtcttccccctggcaccctcctccaagagcacctctgggggcacagcggccctgggctgcctggtcaaggactacttccccgaaccggtgacggtgtcgtggaactcaggcgccctgaccagcggcgtgcacaccttcccggctgtcctacagtcctcaggactctactccctcagcagcgtggtgaccgtgccctccagcagcttgggcacccagacctacatctgcaacgtgaatcacaagcccagcaacaccaaggtggacaagatagtg

SEQ ID NO: 2321 - DNA, 653 bp, Artificial Sequence
  Synthetic polynucleotide encoding artificial human antibody VH chain
agtgtgatgtgcatctggtgcagtctgggggaggcctggtcaagccgggggggtccctgagactctcctgtgcagcctctggattcaacttcaattcttatacaatgacctgggtccgccaggctccagggaaggggctgcagtgggtctcatccattagtagtagtggtggtgacatcaactacgctgactcactgaagggccggttctccatctccagagacaacgccaagaactcagtctttttgcaactgaacagcctgagagccgaggacacggctgtctattactgtgcgagagacactaggtggcgagggttggacagctggggccagggaatcctggtcaccgtctcctcagcctccaccaagggcccatcggtcttccccctggcgccctgctccaggagcacctccgagagcacagcggccctgggctgcctggtcaaggactacttccccgaaccggtgacggtgtcgtggaactcaggcgctctgaccagcggcgtgcacaccttcccggctgtcctacagtcctcaggactctactccctcagcagcgtggtgaccgtgacctccagcaacttcggcacccagacctacacctgcaacgtagatcacaagcccagcaacaccaaggtggacaagacagtg

SEQ ID NO: 2322 - DNA, 666 bp, Artificial Sequence
  Synthetic polynucleotide encoding artificial human antibody VH chain
ggagtgcagctggtggagtctgggggagacttggtacagcccggcaggtccctgagactctcctgtgcagcctctggattcacatttgatgattatgccatgcactgggtccggcaatctccagggaagggcctggagtgggtctcaagtattagttggaatagtggtgacatagcatatggggactctgtgaaggggcgattcaccgtctccagagacaacgccaagaactccctgcatctgcaactgaacagtctgagagttgaggactcggccctctattactgtgcaaaagatctgttagcagtgcctggcctacttgacgactggggccagggaaccctggtcaccgtctccacagcatccccgaccagccccaaggtcttcccgctgagcctctgcagcacccagccagatgggaacgtggtcatcgcctgcctggtccagggcttcttcccccaggagccactcagtgtgacctggagcgaaagcggacagggcgtgaccgccagaaacttcccacccagccaggatgcctccggggacctgtacaccacgagcagccagctgaccctgccggccacacagtgcctagccggcaagtccgtgacatgccacgtgaagcactacacgaatcccagccaggatgtgactgtgccctgccca

SEQ ID NO: 2323 - DNA, 639 bp, Artificial Sequence
  Synthetic polynucleotide encoding artificial human antibody VH chain
caggtgctactggtgcagtctggggctgaggtgaagaagcctgggtcctcggtgaaggtctcctgcaaggcttctggaggcaccttcagcagctatggtatcagctgggtgcgacaggcccctggacaagggcttgagtggatgggagggatggcaaactacgcacagaagttccagggcagagtcacgattagcggggacgaatcaacgagcacagcctacatggagctgagcaacctgacatctgaggacacggccgtgtattactgtgcgagtcggggtggatcttctcgccggtacggtatgggcgtctggggccaagggaccacggtcaccgtctcctcagcctccaccaagggcccatcggtcttccccctggcaccctcctccaagagcacctctgggggcacagcggccctgggctgcctggtcaaggactacttccccgaaccggtgacggtgtcgtggaactcaggcgccctgaccagcggcgtgcacaccttcccggctgtcctacagtcctcaggactctactccctcagcagcgtggtgaccgtgccctccagcagcttgggcacccagacctacatctgcaacgtgaatcacaagcccagcaacaccaaggtggacaagagagtg

SEQ ID NO: 2324 - DNA, 667 bp, Artificial Sequence
  Synthetic polynucleotide encoding artificial human antibody VH chain
gtgtgaggtgcagttgttggagtctgggggagccttggtacagccgggggggtccctgagactctcctgtgcagtctctggattaacctttaacagatttgccatgacctgggtccgccaggctccagggaaggggctggagtgggtctcacacattggtggtagtggtggttacacatactacgcagactccgtgaagggccggttcaccatctctagagacaattccaagaacacgttgtatctgcaaatgaacagcctgcgagccgaggacacggccgtatatcactgtgtgaaattgaagggcattggcgctatgtggacgtacgctatggacgtctggggccaagggaccacggtcaccgtctcctcagcctccaccaagggcccatcggtcttccccctggcgccctgctccaggagcacctccgagagcacagcggccctgggctgcctggtcaaggactacttccccgaaccggtgacggtgtcgtggaactcaggcgctctgaccagcggcgtgcacaccttcccggctgtcctacagtcctcaggactctactccctcagcagcgtggtgaccgtgacctccagcaacttcggcacccagacctacacctgcaacgtagatcacaagcccagcaacaccaaggtggacaagacagtg

SEQ ID NO: 2325 - DNA, 681 bp, Artificial Sequence
  Synthetic polynucleotide encoding artificial human antibody VH chain
cagctgcagctgcaggagtcgggcccaggactggtgaagccttcggacaccctgtccctcacctgcactgtctcgggctactccattagcactgcttactactggggctggatccgacagcccccagggaagggactggaatggattgggagtatctttcacagtgggagcgcctactacaatccgtccctcgacggtcgagtcagcctttcagtggacacgtccaagaaccagttctccctgaggctgaagtctgttaccgccgcagacacggccgtttattactgtgcgagagatcagggctacggtgattacgactatcccagagactggatcgaaccctggggccaaggaaccctggtcaccgtctcttcagcatccccgaccagccccaaggtcttcccgctgagcctcgacagcaccccccaagatgggaacgtggtcgtcgcatgcctggtccagggcttcttcccccaggagccactcagtgtgacctggagcgaaagcggacagaacgtgaccgccagaaacttcccacctagccaggatgcctccggggacctgtacaccacgagcagccagctgaccctgccggccacacagtgcccagacggcaagtccgtgacatgccacgtgaagcactacacgaatcccagccaggatgtgactgtgccctgccca

SEQ ID NO: 2326 - DNA, 370 bp, Artificial Sequence
  Synthetic polynucleotide encoding artificial human antibody VH chain
caggtgcagctggtgcagtctggggctgaggtgaagaagcctgggtcctcggtgaaggtctcctgcaaggcttctggaggcaacgtcagaagttatagcatcagctgggtgcgacaggcccccggacaagggcttgagtggatgggagggatgatcaccacttttggaaaagcggactacgcactgaagttccgtgacagagtcacaataaccgcggacagatccacgaacacagtctacatggaactgagcagcctcacatcacaggacacggccgtctattactgtgcgagcgtccgagacctcgtcagtggcaccacttactactatcactactggggccagggaaccctgatctccgtctcctcag

SEQ ID NO: 2327 - DNA, 644 bp, Artificial Sequence
  Synthetic polynucleotide encoding artificial human antibody VH chain
cccaggtgcagctgcaggagtcgggcccaggactggtgaagccttcggagaccctgtccctcacctgcactgtctctggtgactccatcagtagtaactactggagctggatccggcagcccccagggaagggactggagtggattgggtatatctattacagtgggagcaccaactacaacccctccctcaagagtcgagtcaccatatcagtagacacgtccaagaaccagttctccgtgaagctgagctctgtgaccgctgcggacacggccgtgtattactgtgcgagatacggtgactactcctttgacccctggggccagggaaccctggtcaccgtctcctcagcctccaccaagggcccatcggtcttccccctggcaccctcctccaagagcacctctgggggcacagcggccctgggctgcctggtcaaggactacttccccgaaccggtgacggtgtcgtggaactcaggcgccctgaccagcggcgtgcacaccttcccggctgtcctacagtcctcaggactctactccctcagcagcgtggtgaccgtgccctccagcagcttgggcacccagacctacatctgcaacgtgaatcacaagcccagcaacaccaaggtggacaagagtgag

SEQ ID NO: 2328 - DNA, 656 bp, Artificial Sequence
  Synthetic polynucleotide encoding artificial human antibody VH chain
cccaggttcagttggtgcagtctggagctgaggtgaagaagcctggggcctcagtgaaggtctcctgcaaggcttttggttacaggttttccaactttgggatcagttgggtgcgacaggcccctggacaagggcttgagtggatgggatggatcagcgcttacaatgggaacacaaactatgcacagaagctccagggcagagtcaccatgaccacagacacatccacgagcacagcctacatggagctgaggagcctgagatctgacgacacggccgtgtattactgtgcgagagtcgtagacacagttttggcagactttgactactggggccagggaaccctggtcaccgtctcctcagcctccaccaagggcccatcggtcttccccctggcaccctcctccaagagcacctctgggggcacagcggccctgggctgcctggtcaaggactacttccccgaaccggtgacggtgtcgtggaactcaggcgccctgaccagcggcgtgcacaccttcccggctgtcctacagtcctcaggactctactccctcagcagcgtggtgaccgtgccctccagcagcttgggcacccagacctacatctgcaacgtgaatcacaagcccagcaacaccaaggtggacaagagtgag

SEQ ID NO: 2329 - DNA, 657 bp, Artificial Sequence
  Synthetic polynucleotide encoding artificial human antibody VH chain
caggtgcacctggtgcaatctgggtctgaatttaagaagcctggggcctcagtgaagatttcctgcaagacttctggatacacgttcactaattatgctatgaattgggtgcggcaggcccctggacaaggacttgaatgggtgggatggatcaacaccgtcactgggatcccaggttatgcccagggcttcacaggacgctttatcatctccttggacacctctggccgcacgtcttatctgcagatcaacagcctacaggctgaggacactgccgtatattactgtgcgcgatcagggggctttggctggtcaagggaccttgactactggggccagggaaccctggtcaccgtctcctctgcctccaccaagggcccatcggtcttccccctggcgccctgctccaggagcacctctgggggcacagcggccctgggctgcctggtcaaggactacttccccgaaccggtgacggtgtcgtggaactcaggcgccctgaccagcggcgtgcacaccttcccggctgtcctacagtcctcaggactctactccctcagcagcgtggtgaccgtgccctccagcagcttgggcacccagacctacacctgcaacgtgaatcacaagcccagcaacaccaaggtggacaagagagtt

SEQ ID NO: 2330 - DNA, 669 bp, Artificial Sequence
  Synthetic polynucleotide encoding artificial human antibody VH chain
ccgcagctgcagctgcaggagtcgggcccaggactggtgaagccttcggagaccctgtccctcacctgcagtgtctctggtgactccatcagcagcagtagctacttctggggctggatccgccagccccccgggaaggggctggagtggattgggagtgtctattatagtgggagcacctactacaagccgtccctcaagagtcgactcaccatatccgtagacacgtccaagaagcagttctccctgaatctgagctctatgaccgccgcagacacggctgtttattactgtgcgagacatggattttggagtggccccatacccgacgcttttgatatctggggccaagggacaatggtcaccgtctcctcagcctccaccaagggcccatcggtcttccccctggcaccctcctccaagagcacctctgggggcacagcggccctgggctgcctggtcaaggactacttccccgaaccggtgacggtgtcgtggaactcaggcgccctgaccagcggcgtgcacaccttcccggctgtcctacagtcctcaggactctactccctcagcagcgtggtgaccgtgccctccagcagcttgggcacccagacctacatctgcaacgtgaatcacaagcccagcaacaccaaggtggacaagaatgag

SEQ ID NO: 2331 - DNA, 651 bp, Artificial Sequence
  Synthetic polynucleotide encoding artificial human antibody VH chain
caggtgcagctggtggagtctgggggaggcgtggtccaccctgggaggtccctgagactctcctgtgcagcctctggattcaccttcagtaactatggcatgcactggctccggcaggctccaggcaaggggctggagtgggtggcaattatagcctatgatggaagtcagaaaaagtatgcagactccgtgaagggccgattcaccatttccagagacaattccaaggacacgatgtatctgcaaatgaacaacctgagaactgaggacacggctgtgtattactgtgcgcacgaagactatggttcggggaatggtaattactggggccagggaaccctggtcaccgtctcctcagcctccaccaagggcccatcggtcttccccctggcaccctcctccaagagcacctctgggggcacagcggccctgggctgcctggtcaaggactacttccccgaaccggtgacggtgtcgtggaactcaggcgccctgaccagcggcgtgcacaccttcccggctgtcctacagtcctcaggactctactccctcagcagcgtggtgaccgtgccctccagcagcttgggcacccagacctacatctgcaacgtgaatcacaagcccagcaacaccaaggtggacaagagtgag

SEQ ID NO: 2332 - DNA, 660 bp, Artificial Sequence
  Synthetic polynucleotide encoding artificial human antibody VH chain
cccgtgcacctggtgcagtctggggctgaggtgaggaagcctgggtcctcggtgaaggtctcctgcatggcctctggaggctccttcaacacctatgcagtcaactgggtgcgacaggcccccggacaggggcttgagtggatgggagggatcatccctgtttttggaacaacaaactacgcaccgaggttccagggcagagtcaccattaccgcggacgaatccacgagcacagtctacatggaactgaccagcctgacatctgaggacacggccgtgtattactgtgcgagagaccgcgacagtggctacgagaggaattgtctcgacccctggggccagggaaccctggtcaccgtctcctccgcttccaccaagggcccatccgtcttccccctggcgccctgctccaggagcacctccgagagcacagccgccctgggctgcctggtcaaggactacttccccgaaccggtgacggtgtcgtggaactcaggcgccctgaccagcggcgtgcacaccttcccggctgtcctacagtcctcaggactctactccctcagcagcgtggtgaccgtgccctccagcagcttgggcacgaagacctacacctgcaacgtagatcacaagcccagcaacaccaaggtggacaagagagtg

SEQ ID NO: 2333 - DNA, 695 bp, Artificial Sequence
  Synthetic polynucleotide encoding artificial human antibody VH chain
cccaggtccaacttatgcagtctggggctgaggtgaagcagcctggggcctcagtgaaggtttcctgcaaggcttctggagacaccttcacctcttttgccatccattgggtgcgccaggtctccggacaagggcttgagtggatgggatggatcaacgctggcaatggtgacacgaaatattcacagaagatccagggcagaatcaccataaccagggacacatccgcgagaacagcctacatggagttgagcagcctgagatctgaagacacggctgtgtattattgtgcgaggggggccccttatggttcgcgaatttattatgattacgactcctaccatggtatggacgtctggggccaagggaccacggtcaccgtctcctcagcatccccgaccagccccaaggtcttcccgctgagcctctgcagcacccagccagatgggaacgtggtcatcgcctgcctggtccagggcttcttcccccaggagccactcagtgtgacctggagcgaaagcggacagggcgtgaccgccagaaacttcccacccagccaggatgcctccggggacctgtacaccacgagcagccagctgaccctgccggccacacagtgcctagccggcaagtccgtgacatgccacgtgaagcactacacgaatcccagccaggatgtgactgtgccctgcccg

SEQ ID NO: 2334 - DNA, 666 bp, Artificial Sequence
  Synthetic polynucleotide encoding artificial human antibody VH chain
caggtgcacctgcaggagtcgggcccaggactggtgaagccttcacagaccctgtccctcacctgcactgtctctggtgactccatcagtaacggtgattattgctggaactggatccgccagcgcccagggaagggcctggagtggattgggtacatctatcatagtgggagcacctacgagaacccgtccctcaggagtcgagttaccatgtcagtagacacgtctaagaaccagttctccatggagttgacctctgtgactgccgcggacacggccgtgtattactgtgcgagaggaaagtttgactggttccctcgtgtgtcctcctttgactactggggccggggaaccctggtcaccgtctcctcagcctccaccaagggcccatcggtcttccccctggcaccctcctccaagagcacctctgggggcacagcggccctgggctgcctggtcaaggactacttccccgaaccggtgacggtgtcgtggaactcaggcgccctgaccagcggcgtgcacaccttcccggctgtcctacagtcctcaggactctactccctcagcagcgtggtgaccgtgccctccagcagcttgggcacccagacctacatctgcaacgtgaatcacaagcccagcaacaccaaggtggacaagagtgag

SEQ ID NO: 2335 - DNA, 666 bp, Artificial Sequence
  Synthetic polynucleotide encoding artificial human antibody VH chain
gtggtgcaactggtggagtctgggggagactgggtccagcctggggggtccctgagactctcctgcgcagcctctggattcacctttagaagctattggatgagttgggtccgccaggctccagggaaggggctggagtgggtggccagtgtagagggataccgaagtgaagaatactacgtggactctgtgaagggccgattcaccatctccagagacaacgccaagaattcagtgtatctgcagatgaacagcctaagagccgaggacacggctgtttattactgtgcggccgcctattatattgatactagcggctttgactactggggccagggaacccaggtcactgtctcctcagcatccccgaccagccccaaggtcttcccgctgagcctctgcagcacccagccagatgggaacgtggtcatcgcctgcctggtccagggcttcttcccccaggagccactcagtgtgacctggagcgaaagcggacagggcgtgaccgccagaaacttcccacccagccaggatgcctccggggacctgtacaccacgagcagccagctgaccctgccggccacacagtgcctagccggcaagtccgtgacatgccacgtgaagcactacacgaatcccagccaggatgtgactgtgccctgccca

SEQ ID NO: 2336 - DNA, 673 bp, Artificial Sequence
  Synthetic polynucleotide encoding artificial human antibody VH chain
gtgtgaggtgcaactgttggagtctgggggaaagttggtacagcctggggggtccctgagactctcctgtgcagcctctggattcacctacgacagttatgtcatgaactgggtccgccaggctccagggaaggggctggagtgggtctcaggtattagtgccagtggcggtggcacctactacgcagactccgtgaagggccggttcaccatctccagagacaattccaagaacacgctgtacctggaaatgaacagcctgagagccgacgacacggccgtatattactgtgcgaaaggacggacgtatagcaataactggttatttcactggtacttcgatctctggggccgtggcaccctggtcactgtctcctcagcctccaccaagggcccatcggtcttccccctggcaccctcctccaagagcacctctgggggcacagcggccctgggctgcctggtcaaggactacttccccgaaccggtgacggtgtcgtggaactcaggcgccctgaccagcggcgtgcacaccttcccggctgtcctacagtcctcaggactctactccctcagcagcgtggtgaccgtgccctccagcagcttgggcacccagacctacatctgcaacgtgaatcacaagcccagcaacaccaaggtggacaagaatgag

SEQ ID NO: 2337 - DNA, 657 bp, Artificial Sequence
  Synthetic polynucleotide encoding artificial human antibody VH chain
cccgtgcagctgcaggagtcgggcccaggactggtgaagccttcggagaccctgtccctcacttgcactgtctctagtggctccgtcagcagtggtagtcactactggagctggatccggcagcccccagggaagggactggagtggattgggtatatctattacagtgggacctccaactacaacccctccctcaagggtcgagtcgccatatcagtagacacgtccaagaaccagttctccctgaagctgagctctgtgaccgctgcggacacggccatatattactgtgcgagagtttttagtacgatatttcatggggtcgacccctggggccagggaaccctggtcaccgtctcctcagcctccaccaagggcccatcggtcttccccctggcaccctcctccaagagcacctctgggggcacagcggccctgggctgcctggtcaaggactacttccccgaaccggtgacggtgtcgtggaactcaggcgccctgaccagcggcgtgcacaccttcccggctgtcctacagtcctcaggactctactccctcagcagcgtggtgaccgtgccctccagcagcttgggcacccagacctacatctgcaacgtgaatcacaagcccagcaacaccaaggtggacaagaaagtg

SEQ ID NO: 2338 - DNA, 672 bp, Artificial Sequence
  Synthetic polynucleotide encoding artificial human antibody VH chain
caggtgcagctggtgcagtctggggctgaagtgaagaagcctggggcctcagtaaaggtctcctgcagggcttcaggatacagcttcaccggctattatatacactgggtgcgacaggcccctggacaagggcttgagtggatgggatggatcaaccctaaaactggtgacacacactatgcacagaactttcagggctgggtcaccatgaccagggacacgtccatcagtaccgcctacatggagttgaccattttgagatctgacgacacggccgtgtattactgtgcgagacacttaagcagtggcgaataccactacggtttggacgtctggggccaagggaccacggtcactgcctcctcagcatccccgaccagccccaaggtcttcccgctgagcctctgcagcacccagccagatgggaacgtggtcatcgcctgcctggtccagggcttcttcccccaggagccactcagtgtgacctggagcgaaagcggacagggcgtgaccgccagaaacttcccacccagccaggatgcctccggggacctgtacaccacgagcagccagctgaccctgccggccacacagtgcctagccggcaagtccgtgacatgccacgtgaagcactacacgaatcccagccaggatgtgactgtgccctgccca

SEQ ID NO: 2339 - DNA, 654 bp, Artificial Sequence
  Synthetic polynucleotide encoding artificial human antibody VH chain
taggtgcagctggtggagtctgggggaggcgtggtccagcctgggaggtccctgagactctcctgtgcagcccctggattcaccttcagtaactatggcatgcactgggtccgccaggctccaggcaaggggctggagtgggtggcagttatatcatatgatggaagtaataaatactatgcagactccgtgaagggccgattcaccatctccagagacaattccaagaacacgctgtatctgcaaatgaacagcctgagagctgaggacacggctgtctattactgtgcgaaaggaaagggtatagtgggagccacctttgactactggggccagggaaccctggtcaccgtctcctcagcctccaccaagggcccatcggtcttccccctggcaccctcctccaagagcacctctgggggcacagcggccctgggctgcctggtcaaggactacttccccgaaccggtgacggtgtcgtggaactcaggcgccctgaccagcggcgtgcacaccttcccggctgtcctacagtcctcaggactctactccctcagcagcgtggtgaccgtgccctccagcagcttgggcacccagacctacatctgcaacgtgaatcacaagcccagcaacaccaaggtggacaagaatgtg

SEQ ID NO: 2340 - DNA, 673 bp, Artificial Sequence
  Synthetic polynucleotide encoding artificial human antibody VH chain
gtgtgaggtgcagctggtggagtctgggggaggcctggtcaagcctggggggtccctgagactctcctgtgcagcctctggattcaccttcagtaactataacatgaactgggtccgccaggctccagggaaggggctggagtgggtctcatccattagtagtagtagtagttacatatactacgcagactcagtgaagggccgattcaccatctccagagacaacgccaagaactcactgtatctgcaaatgaacagcctgagagccgaggacacggctgtgtattactgtgcgagagatgcgctagattttgactggttattgtcagccgggggctttgactactggggccagggaaccctggtcaccgtctcctcagcctccaccaagggcccatcggtcttccccctggcaccctcctccaagagcacctctgggggcacagcggccctgggctgcctggtcaaggactacttccccgaaccggtgacggtgtcgtggaactcaggcgccctgaccagcggcgtgcacaccttcccggctgtcctacagtcctcaggactctactccctcagcagcgtggtgaccgtgccctccagcagcttgggcacccagacctacatctgcaacgtgaatcacaagcccagcaacaccaaggtggacaagaaggtg

SEQ ID NO: 2341 - DNA, 651 bp, Artificial Sequence
  Synthetic polynucleotide encoding artificial human antibody VH chain
cccctgcagctgcaggagtcgggcccaggactggtgaagccttcggagaccctgtccctcacctgcactgtctctggtggctccatcagcagtagtagttactactggggctggatccgccagcccccagggaaggggctggagtggattgggagtatctattatagtgggagcacctactacaacccgtccctcaagagtcgagtcaccatatccgtagacacgtccaagaaccagttctccctgaagctgagctctgtgaccgccgcagacacggctgtgtattcctgtgcgagactacttgtggggggtgcttttgatatctggggccaagggacaatggtcaccgtctcttcagcctccaccaagggcccatcggtcttccccctggcaccctcctccaagagcacctctgggggcacagcggccctgggctgcctggtcaaggactacttccccgaaccggtgacggtgtcgtggaactcaggcgccctgaccagcggcgtgcacaccttcccggctgtcctacagtcctcaggactctactccctcagcagcgtggtgaccgtgccctccagcagcttgggcacccagacctacatctgcaacgtgaatcacaagcccagcaacaccaaggtggacaagagtgag

SEQ ID NO: 2342 - DNA, 679 bp, Artificial Sequence
  Synthetic polynucleotide encoding artificial human antibody VH chain
gtgtgaggtgcagctggtggagtctgggggaggcttggtaaagcctggggggtcccttagactctcctgtgcagcctctggtttcactttcagtaacgcctggatgaactgggtccgccaggctccagggaaggggctggagtgggtcggccgtattaaaagcaaaactgatggtgggacaacagactacgctgcacccgtgaaaggcagattcaccatctcaagagatgattcaaaaaacacgctgtatctgcaaatgaacagcctgaaaaccgaggacacagccgtgtattactgtaccccaggatcttgtagtggtggtagctgctactccggcgatgcttttgatatctggggccaagggacaatggtcaccgtctcttcagcctccaccaagggcccatcggtcttccccctggcaccctcctccaagagcacctctgggggcacagcggccctgggctgcctggtcaaggactacttccccgaaccggtgacggtgtcgtggaactcaggcgccctgaccagcggcgtgcacaccttcccggctgtcctacagtcctcaggactctactccctcagcagcatggtgaccgtgccctccagcagcttgggcacccagacctacatctgcaacgtgaatcacaagcccagcaacaccaaggtggacaagagtgag

SEQ ID NO: 2343 - DNA, 660 bp, Artificial Sequence
  Synthetic polynucleotide encoding artificial human antibody VH chain
caggtgcacctggtgcagtctggggctgaggtgaagaagcctggggcctcagtgaaagtttcctgtaaggcatctggatacaccttcaccaactactttatccactgggtgcgacaggcccctggacaggggcctgagtggatgggagtaatcaaccctagttttggaagcacaacctacgcacagaagttgcagggcagagtcaccatgaccagggagacgtccacgagcactgtctacatggaactgagcagcctgagatctgaggacacggccgtctattactgtgcgagagagtcccttgatagtgcctcatatagtaccatcgcacattggggccagggaaccctggtcaccgtctcttcagcctccaccaagggcccatcggtcttccccctggcaccctcctccaagagcacctctgggggcacagcggccctgggctgcctggtcaaggactacttccccgaaccggtgacggtgtcgtggaactcaggcgccctgaccagcggcgtgcacaccttcccggctgtcctacagtcctcaggactctactccctcagcagcgtggtgaccgtgccctccagcagcttgggcacccagacctacatctgcaacgtgaatcacaagcccagcaacaccaaggtggacaagagtgag

SEQ ID NO: 2344 - DNA, 660 bp, Artificial Sequence
  Synthetic polynucleotide encoding artificial human antibody VH chain
caggtgcagctggtgcagtctggggctgaggtgaagaaacctgggtcctcggtgaaggtctcctgcaaggcccctggaggcaccttcaacaactatggtatcagctgggtgcgacaggcccctggacaagggcttgagtggatgggagggatcatgcctatgtttggaagaacaagcgagacacagaagttccagggcagagtcaccattagcgcggacgaatctacgagcacagtgtacatggagatgagtagcctcagatttgacgacacggccgtatattactgtgcgagagatcgaggaggcaacagctggcttgatgtttttgatatgtggggccaagggacaatggtcaccgtctcctcagcctccaccaagggcccatcggtcttccccctggcgccctgctccaggagcacctccgagagcacagcggccctgggctgcctggtcaaggactacttccccgaaccggtgacggtgtcgtggaactcaggcgccctgaccagcggcgtgcacaccttcccggctgtcctacagtcctcaggactctactccctcagcagcgtggtgaccgtgccctccagcaacttcggcacccagacctacacctgcaacgtagatcacaagcccagcaacaccaaggtggacaagacagtt

SEQ ID NO: 2345 - DNA, 672 bp, Artificial Sequence
  Synthetic polynucleotide encoding artificial human antibody VH chain
gaggtacaattgctggagtctgggggaggcttggtacatcctggagggtccctgagactgtcctgtgtggcctctggattcaccttcagtagttatgagatgacctgggtccgccaggctccagggaaggggctggagtggatctcctatatcagcagtactggaaccaccacataccacgcagactctgtgaggggccgattcaccatctccagagacaacgccaagagctcactgtttttgcagatgaacagcctgcgagtcgaagacacggctctgtattactgtgcgagatcccccgccgcctttggctcagagagttactttgactcctggggtcagggagtcctggtcaccgtctcctcagcatccccgaccagccccaaggtcttcccgctgagcctctgcagcacccagccagatgggaacgtggtcatcgcctgcctggtccagggcttcttcccccaggagccactcagtgtgacctggagcgaaagcggacagggcgtgaccgccagaaacttcccacccagccaggatgcctccggggacctgtacaccacgagcagccagctgaccctgccggccacacagtgcctagccggcaagtccgtgacatgccacgtgaagcactacacgaatcccagccaggatgtgactgtgccctgccca

SEQ ID NO: 2346 - DNA, 666 bp, Artificial Sequence
  Synthetic polynucleotide encoding artificial human antibody VH chain
caggtgcagttggtggaatctgggggaggcgtggtccagcctgggaggtccctgagactctcctgtgcagcctctggattcaccttcacgacctatgctgtgcactgggtccgccaggctccaggcaaggggctggagtgggtggcagttatatcaaatgacggaagtaataaaaactacgcagactccgtgaggggccgattcatcatctccagagacaattccaagaacactctgtatctccaaatgaacagcctgagagctgaggacacggctgtgtattactgtgcgaaagatcttctagaggacccatacttcggggacttattgtttgactactggggccagggaaccctggtcaccgtctcctcagcctccaccaagggcccatcggtcttccccctggcaccctcctccaagagcacctctgggggcacagcggccctgggctgcctggtcaaggactacttccccgaaccggtgacggtgtcgtggaactcaggcgccctgaccagcggcgtgcacaccttcccggctgtcctacagtcctcaggactctactccctcagcagcgtggtgaccgtgccctccagcagcttgggcacccagacctacatctgcaacgtgaatcacaagcccagcaacaccaaggtggacaagaatgtg

SEQ ID NO: 2347 - DNA, 671 bp, Artificial Sequence
  Synthetic polynucleotide encoding artificial human antibody VH chain
ccgaggtgcagctggtgcagtctggagcagaggtgaaaaagtccggggagtctctgaagatctcctgtaagggttctggatacacctttaccagctactggatcgcctgggtgcgccagatgcccgggaaaggcctggagtggatggggatcatctatcctggtgactctgataccagatacagcccgtccttccaaggccaggtcaccatctcagccgacaagtccatcagcaccgcctacctgcagtggagcagcctgaaggcctcggacaccgccatgtattactgtgtgaggacccccgctgttggcaccgaccctgactactggggccagggaaccctggtcaccgtctcctcagggagtgcatccgccccaacccttttccccctcgtctcctgtgagaattccccgtcggatacgagcagcgtggccgttggctgcctcgcacaggacttccttcccgactccatcactttctcctggaaatacaagaacaactctgacatcagcagcacccggggcttcccatcagtcctgagagggggcaagtacgcagccacctcacaggtgctgctgccttccaaggacgtcatgcagggcacagacgaacacgtggtgtgcaaagtccagcaccccaacggcaacaaagaaaagaacgtgcctcttccg

SEQ ID NO: 2348 - DNA, 651 bp, Artificial Sequence
  Synthetic polynucleotide encoding artificial human antibody VH chain
gaggtccagttgatggaatctgggggaggtttggtacagccgggggggtccctgagactctcctgtgcagcctctggactcaccttcagcatttatagcatgaattgggtccgccaggccccagggaaggggctggagtgggtttcatatattagtcgggggagcagtgtgatataccacgcagactctgtgaagggccgattcaccatctccagagacgacggcaagaacctactgtatctgcaaatgaacagcctgagagacgacgacacggctatgtattactgttcgagtggggggtccacatcgatggttgggagatactggggccagggatccctggtcaccgtctcctcagcctccaccaagggcccatcggtcttccccctggcaccctcctccaagagcacctctgggggcacagcggccctgggctgcctggtcaaggactacttccccgaaccggtgacggtgtcgtggaactcaggcgccctgaccagcggcgtgcacaccttcccggctgtcctacagtcctcaggactctactccctcagcagcgtggtgaccgtgccctccagcagcttgggcacccagacctacatctgcaacgtgaatcacaagcccagcaacaccaaggtggacaagagagtg

SEQ ID NO: 2349 - DNA, 662 bp, Artificial Sequence
  Synthetic polynucleotide encoding artificial human antibody VH chain
cccaggtcaccttgaaggagtctggtcctgtgctggtgaaacccacagagaccctcacgctgacctgcaccgtctctgggttctcactcagcaatgctagaatgggtgtgagctggatccgtcagcccccagggaaggccctggagtggcttggacacattttttcgaatgacgaaaaatcctacagcacatctctgaagagcaggctcaccatctccaaggacacctccaaaagccaggtggtccttaccttgaccaacatggaccctgtggacacagccacatattactgtgcacggatgaccccattcaagtttggactatgccctgactactggggccagggaaccctggtcaccgtctcctcagcctccaccaagggcccatcggtcttccccctggcaccctcctccaagagcacctctgggggcacagcggccctgggctgcctggtcaaggactacttccccgaaccggtgacggtgtcgtggaactcaggcgccctgaccagcggcgtgcacaccttcccggctgtcctacagtcctcaggactctactccctcagcagcgtggtgaccgtgccctccagcagcttgggcacccagacctacatctgcaacgtgaatcacaagcccagcaacaccaaggtggacaagaaggtg

SEQ ID NO: 2350 - DNA, 659 bp, Artificial Sequence
  Synthetic polynucleotide encoding artificial human antibody VH chain
cccaggtgcagctggtgcagtctggggctgaggtgaagaagcctggggcctcagtgaaggtctcctgcaaggcttctggatacaccttcaccgtctactatatgcactgggtgcgacaggcccctggacaagggcttgagtggatgggacggatcaaccctaacagtggtggcacaaactatgcacagaagtttcagggcagggtcaccatgaccagggacacgtccatcagcacagcctacatggaactgagcaggctgacatctgacgacacggccgtgtattactgtgcgagagtagtggtggtaggtacagactacggtatggacgtctggggccaagggaccacggtcaccgtctcctcagcctccaccaagggcccatcggtcttccccctggcaccctcctccaagagcacctctgggggcacagcggccctgggctgcctggtcaaggactacttccccgaaccggtgacggtgtcgtggaactcaggcgccctgaccagcggcgtgcacaccttcccggctgtcctacagtcctcaggactctactccctcagcagcgtggtgaccgtgccctccagcagcttgggcacccagacctacatctgcaacgtgaatcacaagcccagcaacaccaaggtggacaagagtgag

SEQ ID NO: 2351 - DNA, 659 bp, Artificial Sequence
  Synthetic polynucleotide encoding artificial human antibody VH chain
cccaggttcagctggtgcagtctggagctgaggtgaagaagcctggggcctcagtgaaggtctcctgcaaggcttctggttacacctttaccagctatggtatcagctgggtgcgacaggcccctggacaagggcttgagtggatgggatggatcagcgcttacaatggtaacacaaactatgcacagaagctccagggcagagtcaccatgaccacagacacatccacgagcacagcctacatggagctgaggagcctgacatctgacgacacggccgtgtattactgtgcgagagatcaaggactggagagggctaactggttcgacccctggggccagggaaccctggtcaccgtctcctcagcctccaccaagggcccatcggtcttccccctggcaccctcctccaagagcacctctgggggcacagcggccctgggctgcctggtcaaggactacttccccgaaccggtgacggtgtcgtggaactcaggcgccctgaccagcggcgtgcacaccttcccggctgtcctacagtcctcaggactctactccctcagcagcgtggtgaccgtgccctccagcagcttgggcacccagacctacatctgcaacgtgaatcacaagcccagcaacaccaaggtggacaagaaagtg

SEQ ID NO: 2352 - DNA, 651 bp, Artificial Sequence
  Synthetic polynucleotide encoding artificial human antibody VH chain
caggtacacctgcaggagtcaggtccaggactggtgaagccctcgcggaccctctcactcacctgtgccatctccggggacagtgtctctagcaccagtgctgcttggaactggatcaggcagtccccatcgggaggccttgagtggctgggaaggacattctacaggaccaagtggtatagtgaatctacaggctctctgaaaagtcgaataatcgtcaacccagacacatccaagaaccagttctccctacagctgaattctgtgactcccgaagacacggctgtctattactgtgcaagaggtgtccgccactttgactactggggccagggcaccctggtcaccgtctcctcagcctccaccaagggcccatcggtcttccccctggcaccctcctccaagagcacctctgggggcacagcggccctgggctgcctggtcaaggactacttccccgaaccggtgacggtgtcgtggaactcaggcgccctgaccagcggcgtgcacaccttcccggctgtcctacagtcctcaggactctactccctcagcagcgtggtgaccgtgccctccagcagcttgggcacccagacctacatctgcaacgtgaatcacaagcccagcaacaccaaggtggacaagaaagtg

SEQ ID NO: 2353 - DNA, 653 bp, Artificial Sequence
  Synthetic polynucleotide encoding artificial human antibody VH chain
cccaggtgcagctgcaggagtcgggcccaggactggtgaagccttcggggaccctgtccctcacctgcgcagtctctggtggctccatcagcagtagtaactgctggagttgggtccgccagccccccgggaaggggctggagtggcttggggaaatctgtcatagtgggagcaccagctacaacccgtccctcaagagtcgagtcaccatatcagtcgacaagtctaagaaccagttctccctgaaactgcgctctgtgaccgccgcggacacggccgtgtattactgtgcgagagagtcacctttaactgtcgtctttgactactggggccagggaaccctggtcaccgtctcctcagcctccaccaagggcccatcggtcttccccctggcaccctcctccaagagcacctctgggggcacagcggccctgggctgcctggtcaaggactacttccccgaaccggtgacggtgtcgtggaactcaggcgccctgaccagcggcgtgcacaccttcccggctgtcctacagtcctcaggactctactccctcagcagcgtggtgaccgtgccctccagcagcttgggcacccagacctacatctgcaacgtgaatcacaagcccagcaacaccaaggtggacaagaaagtg

SEQ ID NO: 2354 - DNA, 645 bp, Artificial Sequence
  Synthetic polynucleotide encoding artificial human antibody VH chain
gaggtgcagctggtggagtctgggggaggcttggtccagcctggggggtccctgagactctcctgtgcagcctctgggttcaccgtcagtagcaactacatgagctgggtccgccaggctccagggaaggggctggagtgggtctcagttatttatagcggtggtagcacatactacgcagactccgtgaagggccgattcaccatctccagagacaattccaagaacacgctgtctcttcaaatgaacagcctgagagccgaggacacggccgtgtattactgtgcgagggaatcctcagcagctggttatgactactggggccagggaaccctggtcaccgtctcctcagcctccaccaagggcccatcggtcttccccctggcaccctcctccaagagcacctctgggggcacagcggccctgggctgcctggtcaaggactacttccccgaaccggtgacggtgtcgtggaactcaggcgccctgaccagcggcgtgcacaccttcccggctgtcctacagtcctcaggactctactccctcagcagcgtggtgaccgtgccctccagcagcttgggcacccagacctacatctgcaacgtgaatcacaagcccagcaacaccaaggtggacaagagtgtg

SEQ ID NO: 2355 - DNA, 665 bp, Artificial Sequence
  Synthetic polynucleotide encoding artificial human antibody VH chain
cccaggtgcagttggtgcagtcgggggctgaggtgaggaagcctggggcctcagtgaaggtttcctgcaaggcatctggatacaccttcaccacctactacatacactgggtgcgacaggcccctggacaagggcttgagtggatggggttaatcaaccctaatggtggtactactaactacgcacagaagttccagggcagactcagcatgaccacggacacgtccaccaacacagtctacatggagctgagtagcctgagatctgaagacacggccgtgtattactgtgcgagaaagcttatgtctggcatagtgtctcggggctggttcgacccctggggccagggaaccctggtcaccgtctcctcagcctccaccaagggcccatcggtcttccccctggcaccctcctccaagagcacctctgggggcacagcggccctgggctgcctggtcaaggactacttccccgaaccggtgacggtgtcgtggaactcaggcgccctgaccagcggcgtgcacaccttcccggctgtcctacagtcctcaggactctactccctcagcagcgtggtgaccgtgccctccagcagcttgggcacccagacctacatctgcaacgtgaatcacaagcccagcaacaccaaggtggacaagagtgtg

SEQ ID NO: 2356 - DNA, 660 bp, Artificial Sequence
  Synthetic polynucleotide encoding artificial human antibody VH chain
cccgtgcagctgcaggagtcgggcccaggactggtgaagccttcggagaccctgtccctcacctgcactgtctctggtggctccgtcagcagtggtagttactactggagctggatccggcagcccccagggaagggactggagtggattgggtatatctattacagtgggagcaccaactacaacccctccctcaagagtcgagtcaccatatcagtagacacgtccaagaaccagttctccctgaagctgagctctgtgaccgctgcggacacggccgtgtattactgtgcgagagatcgcggtgactacgttacccactggttcgacccctggggccagggaaccctggtcaccgtctcctcagcctccaccaagggcccatcggtcttccccctggcaccctcctccaagagcacctctgggggcacagcggccctgggctgcctggtcaaggactacttccccgaaccggtgacggtgtcgtggaactcaggcgccctgaccagcggcgtgcacaccttcccggctgtcctacagtcctcaggactctactccctcagcagcgtggtgaccgtgccctccagcagcttgggcacccagacctacatctgcaacgtgaatcacaagcccagcaacaccaaggtggacaagagtgag

SEQ ID NO: 2357 - DNA, 657 bp, Artificial Sequence
  Synthetic polynucleotide encoding artificial human antibody VH chain
cagctgcagctgcaggagtcgggcccaggactggtgaagccttgggagaccctgtccctcagttgcactgtctctggtggctccatcagcagtagtttcttctactggggctggatccgccagcccccagggaaggggctgcagtggattgggaatatccattatactgggagcacctactacaacccgtccctcaagagtcgaatcaccatgtccgtagacacgtccaagaaccagttctccctgaagctgagctctgtgaccgccgcagacacggctgtgtattactgtgcgagacatagggttggcgacagcccgggactccactactggggccagggaaccctggtcaccgtctcctcagcctccaccaagggcccatcggtcttccccctggcaccctcctccaagagcacctctgggggcacagcggccctgggctgcctggtcaaggactacttccccgaaccggtgacggtgtcgtggaactcaggcgccctgaccagcggcgtgcacaccttcccggctgtcctacagtcctcaggactctactccctcagcagcgtggtgaccgtgccctccagcagcttgggcacccagacctacatctgcaacgtgaatcacaagcccagcaacaccaaggtggacaagagtgag

SEQ ID NO: 2358 - DNA, 651 bp, Artificial Sequence
  Synthetic polynucleotide encoding artificial human antibody VH chain
caggtgcagctggtggagtctgggggaggcgtggtccagcctgggaggtccctgagactctcctgtgcagcctctggattcaccttcagtagctatgctatgcactgggtccgccaggctccaggcaaggggctagagtgggtggcagttatatcatatgatggaagtaataaatactacgcagactccgtgaagggccgattcaccatctccagagacaattccaagaacacgctgtatctgcaaatgaacagcctgagagctgaggacacggctgtgtattactgtgcgagccctatagcagtggctgccccctttgcctactggggccagggaaccctggtcaccgtctcctcagcctccaccaagggcccatcggtcttccccctggcaccctcctccaagagcacctctgggggcacagcggccctgggctgcctggtcaaggactacttccccgaaccggtgacggtgtcgtggaactcaggcgccctgaccagcggcgtgcacaccttcccggctgtcctacagtcctcaggactctactccctcagcagcgtggtgaccgtgccctccagcagcttgggcacccagacctacatctgcaacgtgaatcacaagcccagcaacaccaaggtggacaagagtgag

SEQ ID NO: 2359 - DNA, 688 bp, Artificial Sequence
  Synthetic polynucleotide encoding artificial human antibody VH chain
gtgtgaggtgcaactgttggagtctgggggaggcttggtacagcctggggggtccctgagactctcctgtgcagcctctggattcacctttagcacctatgtcatgagctgggtccgccaggctccagggaaggggctggagtgggtctcattaattagtggcagtggtggtagcacacactacgcagactccgtgaggggccggttcaccatctccagagacaattccaagaatacgctgtatctgcaaatgaacagtctgagagccgaggacacggccgtatattactgtgtgaaggattatcttgctgttggtgggacctactacgactactttgactactggggccagggaaccctggtcaccgtctcctcagggagtgcatccgccccaacccttttccccctcgtctcctgtgagaattccccgtcggatacgagcagcgtggccgttggctgcctcgcacaggacttccttcccgactccatcactttctcctggaaatacaagaacaactctgacatcagcagcacccggggcttcccatcagtcctgagagggggcaagtacgcagccacctcacaggtgctgctgccttccaaggacgtcatgcagggcacagacgaacacgtggtgtgcaaagtccagcaccccaacggcaacaaagaaaagaacgtgcctcttccg

SEQ ID NO: 2360 - DNA, 651 bp, Artificial Sequence
  Synthetic polynucleotide encoding artificial human antibody VH chain
cccctgcagctgcaggagtcgggcccaggactggtgaagccttcggagaccctgtccctcacctgcactgtctctggtggctccatcagcagtagtagttactactggggctggatccgccagtccccagggaaggggctggagtggatggggagtatctattatagtgggagcacctactacaacccgtccctcaagagtcgagtcaccatatccgtagacacgtccaagaaccagttctccctgaacctgagctctgtgaccgccgcagacacggctgtgtattactgtgcgagacatgactaccgtaactactttgactactggggccagggaaccctggtcaccgtctcctcagcctccaccaagggcccatcggtcttccccctggcaccctcctccaagagcacctctgggggcacagcggccctgggctgcctggtcaaggactacttccccgaaccggtgacggtgtcgtggaactcaggcgccctgaccagcggcgtgcacaccttcccggctgtcctacagtcctcaggactctactccctcagcagcgtggtgaccgtgccctccagcagcttgggcacccagacctacatctgcaacgtgaatcacaagcccagcaacaccaaggtggacaagagtgag

SEQ ID NO: 2361 - DNA, 662 bp, Artificial Sequence
  Synthetic polynucleotide encoding artificial human antibody VH chain
cccaggtgcagctggtgcagtctggggctgaggtgaagaagcctggggcctcagtgaaggtctcctgccaggcttctggatacaccttcaccggctactatatacactgggtgcgacaggcccctggacaagggcttgagtggatgggatggatcaaccctaacagtggtggcacaaactatgcacagaagtttcagggcagggtcaccatgaccagggacacgtccatcagcacagcccacatggagctgggcaggctgagatctgacgacacggccgtgtattactgtgcgaccccaccgtctcgatatggtggaaactactacgcagactactggggccagggaaccctggtcaccgtctcctcagcctccaccaagggcccatcggtcttccccctggcaccctcctccaagagcacctctgggggcacagcggccctgggctgcctggtcaaggactacttccccgaaccggtgacggtgtcgtggaactcaggcgccctgaccagcggcgtgcacaccttcccggctgtcctacagtcctcaggactctactccctcagcagcgtggtgaccgtgccctccagcagcttgggcacccagacctacatctgcaacgtgaatcacaagcccagcaacaccaaggtggacaagaaggtg

SEQ ID NO: 2362 - DNA, 648 bp, Artificial Sequence
  Synthetic polynucleotide encoding artificial human antibody VH chain
ccggtgcagctggtgcagtctggagcagaggtgaaaaagcccggggactctctgagcatctcctgtgaggtttctggatacagctttaccagctactggattggctgggtgcgccagatgcccgggaaaggcctggagtggatggcgatcatcaatcctgctgactctgataccagatacagtccgtccttccgaggccaggtcaccatctcagtcgacaagtccatcaacaccgcctacctgcagtggaccagcctgcaggcctcggacaccgccatgtattactgtgcgagacaagggccgacagtagcgattgacttctggggccagggaaccctggtcaccgtctcctcagcctccaccaagggcccatcggtcttccccctggcaccctcctccaagagcacctctgggggcacagcggccctgggctgcctggtcaaggactacttccccgaaccggtgacggtgtcgtggaactcaggcgccctgaccagcggcgtgcacaccttcccggctgtcctacagtcctcaggactctactccctcagcagcgtggtgaccgtgccctccagcagcttgggcacccagacctacatctgcaacgtgaatcacaagcccagcaacaccaaggtggacaagagtgag

SEQ ID NO: 2363 - DNA, 349 bp, Artificial Sequence
  Synthetic polynucleotide encoding artificial human antibody VH chain
gaggtgcagctggtgcagtctggagcagaggtgaaaaagcccggggagtctctgaagatctcctgtaagggttctggatacagctttaccacctactggatcgcctgggtgcgccagatgcccgggaaaggcctggagtggatggggatcatctatcctgctgactctgataccagatacagcccgtccttccaaggccaggtcaccatgtcagccgaccagtccatcaataccgcctacctgcagtggagcagcctgaaggcctcggacaccgccatgtattactgtgcgagacggggtagagagtttgattactggggccagggaaccctgctcaccgtctcctcag

SEQ ID NO: 2364 - DNA, 670 bp, Artificial Sequence
  Synthetic polynucleotide encoding artificial human antibody VH chain
gtgtgaggtgcagctgttggagtctgggggaggcttggtgcagcctggggggtccctgagactctcctgtgcagcctctggattcacctttagaatctatgccatgagctgggtccgccaggctccagggaaggggctggagtgggtctcagctatcagttatagtggtaataccacatactacgcagactccgtgaagggccgtttcaccatctccagagacaattccaagaacacgctgtatctgcaaatcaacaacctaagagccgaggacacggccatatattactgtgcgatccaggaaaaacgggaactgcaactacgtcgagaactagataactactggggccagggaaccctggtcaccgtctcctcagcctccaccaagggcccatcggtcttccccctggcaccctcctccaagagcacctctgggggcacagcggccctgggctgcctggtcaaggactacttccccgaaccggtgacggtgtcgtggaactcaggcgccctgaccagcggcgtgcacaccttcccggctgtcctacagtcctcaggactctactccctcagcagcgtggtgaccgtgccctccagcagcttgggcacccagacctacatctgcaacgtgaatcacaagcccagcaacaccaaggtggacaagaaagtg

SEQ ID NO: 2365 - DNA, 351 bp, Artificial Sequence
  Synthetic polynucleotide encoding artificial human antibody VH chain
caggtgcagctggtgcagtctggggctgaggtgaagaagcctggggcctcagtgaaggtttcctgcaaggcatctggatacaccttcaccagctactatatgtactgggtgcgacaggcccctggacaagggcttgagtggatgggaataatcaaccctggtggtggtagcacaagctacgcacagaagttccagggcagagtcaccatgaccagggacacgtccacgagcacagtctacatggagctgagcagcctgagatctgaggacacggccgtgtattactgtgcgagagtatttcgatacggtatggacgtctggggccaagggaccacggtcaccgtctcctca

SEQ ID NO: 2366 - DNA, 352 bp, Artificial Sequence
  Synthetic polynucleotide encoding artificial human antibody VH chain
caggtgcaggtggtggaatctgggggaggcttggtcaagcctggagggtccctgagactctcctgtgcagtctctggattagacttcagggactactatgtaaactggatccgtcaggctccggggaaggggctggagtggctttcctacattactagtcctggtggtcacacaagctactcagactctgtgaagggccgattcaccatctccagagacaacgccaagaattcagtgtatctccaaatggacagcctgacagtcgaggacacggccgtatatttctgtgcgatcaaagaaggctacggtctttcagactggggccagggaaccctggtcaccgtctcgtcag

SEQ ID NO: 2367 - DNA, 669 bp, Artificial Sequence
  Synthetic polynucleotide encoding artificial human antibody VH chain
gtggtgcagctgttggagtctgggggaggcttggtacagcctggggggtccctgagactctcctgtgcagcctctggattcacctttatcagttatgccatgagctgggtccgccaggctccagggaaggggctggagtgggtctcagatattagtggcagtggtggtagcacatactacgcagactccgtgaagggccggctcaccatctccagagacaattccaacaacacgctgtatttgcaaatgaacagcctgagagccgaggacacggccgtatattactgtgcgaaagaggatggctacactcaaaattttgactactggggccagggaaccctggtcaccgtctcctcagggagtgcatccgccccaacccttttccccctcgtctcctgtgagaattccccgtcggatacgagcagcgtggccgttggctgcctcgcacaggacttccttcccgactccatcactttctcctggaaatacaagaacaactctgacatcagcagcacccggggcttcccatcagtcctgagagggggcaagtacgcagccacctcacaggtgctgctgccttccaaggacgtcatgcagggcacagacgaacacgtggtgtgcaaagtccagcaccccaacggcaacaaagaaaagaacgtgcctcttcca

SEQ ID NO: 2368 - DNA, 364 bp, Artificial Sequence
  Synthetic polynucleotide encoding artificial human antibody VH chain
caggtccaacttgtgcagtctggggccgaggtgaagaagccaggggcctcagtgaagatttcctgcaaggcctctggatacaccttcactagtcatgccatacactgggtgcgccaggcccccggacaaacttttgagtggctgggctggatcaaccctgtcaatggggtcacaaaatattcacagacgtttcaggacagagtcaccattgtgagggacaagtccgcgaccacaacctacatggacctgagcgggctgacatttgaagacacggctatgtattattgtgcgagagttctggacttttatggaagtagtgtcctagactactggggccagggaaccctggtcactgtctcctcag

SEQ ID NO: 2369 - DNA, 346 bp, Artificial Sequence
  Synthetic polynucleotide encoding artificial human antibody VH chain
cacgtgcagctggtgcaatctgggtctgagttgaagaagcctggggcctcagtgaaactttcctgcaaggcttctggatacaccttcactaactatgctatgaattgggtgcgacaggcccctggacaagggcttgagtggatggggtggatcaacaccaacactgggaacccaacgtatgcccagggcttcacaggacggtttgtcttctccttggacacctctgtcagcacggcatatctgcagatcagcagcctaaaggctgaggacactgccctgtattactgtgcgagagatcggcccggggactactggggccagggaaccctggtcaccgtctcctcag

SEQ ID NO: 2370 - DNA, 648 bp, Artificial Sequence
  Synthetic polynucleotide encoding artificial human antibody VH chain
caggtgcagctggtggagtctgggggaggcgtggtccagcctgggaggtccctgagactctcctgtgcagcctctggattcaccttcagtaactttgctatgcactgggtccgccaggctccaggcaaggggttggagtgggtggtggttatttcatctgatggaagcaataaaaactacgcagactccgtgaagggccgattcaccatctccagagacaattccaagaacacgctgtatctgcaaatgaacagcctgagagctgaggacacggctgtgtattactgtgcgagagatcttggtgtgggatctactacctactggggccagggaaccctggtcaccgtctcctcagcctccaccaagggcccatcggtcttccccctggcaccctcctccaagagcacctctgggggcacagcggccctgggctgcctggtcaaggactacttccccgaaccggtgacggtgtcgtggaactcaggcgccctgaccagcggcgtgcacaccttcccggctgtcctacagtcctcaggactctactccctcagcagcgtggtgaccgtgccctccagcagcttgggcacccagacctacatctgcaacgtgaatcacaagcccagcaacaccaaggtggacaagagagtc

SEQ ID NO: 2371 - DNA, 657 bp, Artificial Sequence
  Synthetic polynucleotide encoding artificial human antibody VH chain
ggggagcagctgttggagtctgggggaggcttggttcagccgggggggtccctgagactctcctgtgcagcctctggattcaccttcagtcactacgccatgacctgggtccgccaggctccagggaaggggctcgaatgggtctcaggtgttagtggaagtggttttaccacttattacgcagactccgttaagggccggttcaccatctcccgagacaatgcccagaacacactgtatctgcacatgaacagcctgagagccgaggacacggccatatattactgtgtgaaagatttggaggtttctataggtcacaattttgacttttggggccagggaaccctggtcaccgtctcctcagcctccaccaagggcccatcggtcttccccctggcaccctcctccaagagcacctctgggggcacagcggccctgggctgcctggtcaaggactacttccccgaaccggtgacggtgtcgtggaactcaggcgccctgaccagcggcgtgcacaccttcccggctgtcctacagtcctcaggactctactccctcagcagcgtggtgaccgtgccctccagcagcttgggcacccagacctacatctgcaacgtgaatcacaagcccagcaacaccaaggtggacaagagagtc

SEQ ID NO: 2372 - DNA, 675 bp, Artificial Sequence
  Synthetic polynucleotide encoding artificial human antibody VH chain
gaggtgcagctggtggagtctgggggaggcctggtcaagcctggggggtccctgagactctcctgtgcagcctctggattcaccttcagtagctatagcatgaactgggtccgccaggctccagggaaggggctggagtgggtctcatccattagtagtagtagtagttacatatactacgcagactcagtgaagggccgattcaccatctccagagacaacgccaagaactcactgtatctgcaaatgaacagcctgagagccgaggacacggctgtgtattactgtgcgagagataggggggtagtggtggtagctgctaccccttactactacggtatggacgtctggggccaagggaccacggtcaccgtctcctcagcctccaccaagggcccatcggtcttccccctggcaccctcctccaagagcacctctgggggcacagcggccctgggctgcctggtcaaggactacttccccgaaccggtgacggtgtcgtggaactcaggcgccctgaccagcggcgtgcacaccttcccggctgtcctacagtcctcaggactctactccctcagcagcgtggtgaccgtgccctccagcagcttgggcacccagacctacatctgcaacgtgaatcacaagcccagcaacaccaaggtggacaagaaagtc

SEQ ID NO: 2373 - DNA, 669 bp, Artificial Sequence
  Synthetic polynucleotide encoding artificial human antibody VH chain
cagatcaccttgaaggagtctggtcctacgctggtgaaacccacacagaccctcactctgacctgcaccttctctgggttctcactcagtactaatggagtgggtgtgggctggatccgtcagcccccaggaaaggccctggagtggcttgcactcattaattgggatgatgataagcgctacagtccatctctgaagagcaggctcaccatcactaaggacacctccaaaaaccaggttgtccttacaatgaccaacctggaccctgtagacacagccacatattactgtgtacacgcacgagatgactacggtgactccgcttggtcaactgggcctgtctggggccagggaaccctggtcaccgtctcctcagcctccaccaagggcccatcggtcttccccctggcaccctcctccaagagcacctctgggggcacagcggccctgggctgcctggtcaaggactacttccccgaaccggtgacggtgtcgtggaactcaggcgccctgaccagcggcgtgcacaccttcccggctgtcctacagtcctcaggactctactccctcagcagcgtggtgaccgtgccctccagcagcttgggcacccagacctacatctgcaacgtgaatcacaagcccagcaacaccaaggtggacaagagagtt

SEQ ID NO: 2374 - DNA, 669 bp, Artificial Sequence
  Synthetic polynucleotide encoding artificial human antibody VH chain
ctgatcaccttgaaggagtctggtcctacgctggtgaaacccacacagaccctcacgctgacctgcaccgtctctgggttgtcactcagcactagtggagtggctgtgggctggatccgtcagcccccaggaaaggccctggagtggcttgcactcatttattgggatgatgatacgcggtacagcccatctctgaagagcaggctcagcatcaccaaggacacctccaaaaaccaggtggtccttacaatgagaaacgtggaccctgtggacacagccacatattactgtggacacagacgtctgttaaggggggttactactactgtctatttcgacccctggggccagggaaccctggtcaccgtctcctcagcctccaccaagggcccatcggtcttccccctggcaccctcctccaagagcacctctgggggcacagcggccctgggctgcctggtcaaggactacttccccgaaccggtgacggtgtcgtggaactcaggcgccctgaccagcggcgtgcacaccttcccggctgtcctacagtcctcaggactctactccctcagcagcgtggtgaccgtgccctccagcagcttgggcacccagacctacatctgcaacgtgaatcacaagcccagcaacaccaaggtggacaagagagtc

SEQ ID NO: 2375 - DNA, 669 bp, Artificial Sequence
  Synthetic polynucleotide encoding artificial human antibody VH chain
ccggtgcagctgcaggagtcgggcccaggacttgtgaacccttcacagaccctgtccctcacctgcactgtctctggtggctccatcagcagcggtggttactgctggagctgggtccgccagcacccagggaagggcctggaatggattgggtgcatctattacattgggaccacctactacatgcggtccctcaagagtcgacttatcatatcaatagacacgtctaagaaccagttctccctgaagctgacctctgtgactgccgcggactcggccgtgtattactgtgcgagaggaggggagctgctgggcggattcggctacagtggtatggacgtctggggccaagggaccacggtcaccgtctcctcagcttccaccaagggcccatccgtcttccccctggcgccctgctccaggagcacctccgagagcacagccgccctgggctgcctggtcaaggactacttccccgaaccggtgacggtgtcgtggaactcaggcgccctgaccagcggcgtgcacaccttcccggctgtcctacagtcctcaggactctactccctcagcagcgtggtgaccgtgccctccagcagcttgggcacgaagacctacacctgcaacgtagatcacaagcccagcaacaccaaggtggacaagagagtt

SEQ ID NO: 2376 - DNA, 672 bp, Artificial Sequence
  Synthetic polynucleotide encoding artificial human antibody VH chain
gagctgcagctggtggagtctgggggaggcttggtccagcctggggggtccctgcgactctcctgtgcagcctctggattcacctttagtagctattggatgagctgggtccgccaggctccagggaaggggctggagtgggtggccaacataaaccaagatggaggtgagaaatactatgtggactctgtgaagggccgattcaccatctccagagacaacgccaagaactcactgtatctgcaaatgaacagcctgagagccgaggacacggccgtgtattactgtgcgcattattattatgatagtagtggttattaccaaaacgctgaatacttccagtactggggccagggcaccctggtcaccgtctcctcagcctccaccaagggcccatcggtcttccccctggcaccctcctccaagagcacctctgggggcacagcggccctgggctgcctggtcaaggactacttccccgaaccggtgacggtgtcgtggaactcaggcgccctgaccagcggcgtgcacaccttcccggctgtcctacagtcctcaggactctactccctcagcagcgtggtgaccgtgccctccagcagcttgggcacccagacctacatctgcaacgtgaatcacaagcccagcaacaccaaggtggacaagaaagtg

SEQ ID NO: 2377 - DNA, 678 bp, Artificial Sequence
  Synthetic polynucleotide encoding artificial human antibody VH chain
caggttcagctggtgcagtctggggctgaagttaagaagcctgggtcctcggtgaaggtctcctgtaaggcttctagaggcaccttcagcaaccatgctgtcagctgggtgcgacaggcccccggacaagggcttgagtgggtgggagggatcatccctgtctttggtccaccaaactacgcacagaagttccggggcagagtcacgattaccgcggacagatccacgaacacagcctacatggagctgaacagcctgagatctgaggacacggccgtatattactgtgcgagaacccagtgggggaccgatgtagaggcaacgaatccctactactatttcatggacgtctggggcaaagggaccacggtcaccgtctcctcagcctccaccaagggcccatcggtcttccccctggcaccctcctccaagagcacctctgggggcacagcggccctgggctgcctggtcaaggactacttccccgaaccggtgacggtgtcgtggaactcaggcgccctgaccagcggcgtgcacaccttcccggctgtcctacagtcctcaggactctactccctcagcagcgtggtgaccgtgccctccagcagcttgggcacccagacctacatctgcaacgtgaatcacaagcccagcaacaccaaggtggacaagagagtg

SEQ ID NO: 2378 - DNA, 651 bp, Artificial Sequence
  Synthetic polynucleotide encoding artificial human antibody VH chain
caggtgcagctggtgcagtctgggactgagatgaagaggcctgggtcctcggtgaaggtctcctgcaaggcttctggaggcaccttcaacttctatgctatcaactgggtgcgacaggcccctggacaagggcttgagtggatgggagggatcgtccctatctttgatacaacaacttacgcacagaggttccagggcagagtcaccattacggcggacgagtccacgaccacagtccacatggaactgagcagcctgagatttgacgacacggccgtctattactgtgcgcgagatcagagtggagctgacagatttgactcctggggccagggaaccctggtcaccgtctcctcagcctccaccaagggcccatcggtcttccccctggcaccctcctccaagagcacctctgggggcacagcggccctgggctgcctggtcaaggactacttccccgaaccggtgacggtgtcgtggaactcaggcgccctgaccagcggcgtgcacaccttcccggctgtcctacagtcctcaggactctactccctcagcagcgtggtgaccgtgccctccagcagcttgggcacccagacctacatctgcaacgtgaatcacaagcccagcaacaccaaggtggacaagagtgag

SEQ ID NO: 2379 - DNA, 654 bp, Artificial Sequence
  Synthetic polynucleotide encoding artificial human antibody VH chain
caggtccagcttgtgcagtctggggctgaggtgaagaagcctggggcctcagtgaaaatttcctgtcaggcttttggatataacttcattgacaatgctatacattgggtgcgccaggcccccggacaaaggcctgagtggatgggatggatcaacgctggcaatgggaacacaagatattcacagaatttccagggcagagtcaccataaccaaagtcacatccgcgagcacagcctacatggagatgagccgcctgaaatctgaggacacggctgtgtatttctgtgcgagatcttcgaagtggacggactggcattttgactactggggccagggaaccctggtcaccgtctcctcagcctccaccaagggcccatcggtcttccccctggcaccctcctccaagagcacctctgggggcacagcggccctgggctgcctggtcaaggactacttccccgaaccggtgacggtgtcgtggaactcaggcgccctgaccagcggcgtgcacaccttcccggctgtcctacagtcctcaggactctactccctcagcagcgtggtgaccgtgccctccagcagcttgggcacccagacctacatctgcaacgtgaatcacaagcccagcaacaccaaggtggacaagagtgag

SEQ ID NO: 2380 - DNA, 659 bp, Artificial Sequence
  Synthetic polynucleotide encoding artificial human antibody VH chain
cccagattcaactggtccagtctggagctgaggtgaagaagcctggggcctcagtgaaggtctcctgcaagacttctggttacacttttacccactatggtgtcgcctgggtgcgacaggcccctggacaagggcctgagtggatgggatggatcagcccttacaatggtaacatagagtatggacagaagttccaggggagagtcactatgaccacagacacatcgacgaatacagcctacatggagctgaggagcctgagatatgacgacacggccgtctattactgtgcgagagatctcgacgaaataaatagttcttggctcgacccctggggccagggaaccctgatcatcgtctccccagcctccaccaagggcccatcggtcttccccctggcaccctcctccaagagcacctctgggggcacagcggccctgggctgcctggtcaaggactacttccccgaaccggtgacggtgtcgtggaactcaggcgccctgaccagcggcgtgcacaccttcccggctgtcctacagtcctcaggactctactccctcagcagcgtggtgaccgtgccctccagcagcttgggcacccagacctacatctgcaacgtgaatcacaagcccagcaacaccaaggtggacaagagtgag

SEQ ID NO: 2381 - DNA, 678 bp, Artificial Sequence
  Synthetic polynucleotide encoding artificial human antibody VH chain
gtggtgcagttgttggagtctgggggaggcgtggtacagccgggggggtccctgagactctcctgtgcagcctctggattcacctttagcaactatgccatgaactgggtccgccaggctccagggaaggggctggagtgggtcacaggcattagtggtcctggtgaaagttcatactacgcagactccgtgaagggccggttcaccgtctccagagacaattacaggaacactctatatctgcaaatgaacgacttgggagccgaagacacggccacatatttctgtgcgaaacgccccaccgctggaaacagctatggtggatactactttgaccattggggccagggaaccctggtcaccgtctcctcagcatccccgaccagccccaaggtcttcccgctgagcctctgcagcacccagccagatgggaacgtggtcatcgcctgcctggtccagggcttcttcccccaggagccactcagtgtgacctggagcgaaagcggacagggcgtgaccgccagaaacttcccacccagccaggatgcctccggggacctgtacaccacgagcagccagctgaccctgccggccacacagtgcctagccggcaagtccgtgacatgccacgtgaagcactacacgaatcccagccaggatgtgactgtgccctgccca

SEQ ID NO: 2382 - DNA, 672 bp, Artificial Sequence
  Synthetic polynucleotide encoding artificial human antibody VH chain
caggtgcaactggtgcagtctggggctgaggtgaagaagcctggggcctcagtgaagctttcctgcaagccatctggatacaccttcagcagctactatatccactggctgcgacaggcccctggacaagggcttgagtggatgggaataatcaaccctagcggtggttacacaagctccgcacagaaattccagggcagagtcaccatgaccagggacacgtccacgagcacaatctacatggagctgagcagcctgagagctgaggacacggccgtgtattactgtgcgagacggggcgaagtcgggactatggttcgggttttccgaaagccgtttgactactggggccagggaaccctggtcaccgtctcctccgcctccaccaagggcccatcggtcttccccctggcaccctcctccaagagcacctctgggggcacagcggccctgggctgcctggtcaaggactacttccccgaaccggtgacggtgtcgtggaactcaggcgccctgaccagcggcgtgcacaccttcccggctgtcctacagtcctcaggactctactccctcagcagcgtggtgaccgtgccctccagcagcttgggcacccagacctacatctgcaacgtgaatcacaagcccagcaacaccaaggtggacaagaaggtg

SEQ ID NO: 2383 - DNA, 669 bp, Artificial Sequence
  Synthetic polynucleotide encoding artificial human antibody VH chain
ccggtgcagctggtgcagtctggagcagaggtgaaaaagcccggggagtctctgaagatctcctgtcagggttctggatacaactttagtcgctactggatcggctgggtgcgccagatgcccgggaaaggcctggagtggatgggggtcgtctttcctggtgactctgatatcagatacagcctgtccttccaaggccacatcaccatctacgccgacaactccatcagcaccgcctacctccagtggagcagcctgaaggcctcggacaccgccatttattactgtgcgacaacctcgactatgccaatgcctactagagggagagactggttcgacccctggggccagggaaccctggtcaccgtctcctcagcctccaccaagggcccatcggtcttccccctggcaccctcctccaagagcacctctgggggcacagcggccctgggctgcctggtcaaggactacttccccgaaccggtgacggtgtcgtggaactcaggcgccctgaccagcggcgtgcacaccttcccggctgtcctacagtcctcaggactctactccctcagcagcgtggtgaccgtgccctccagcagcttgggcacccagacctacatctgcaacgtgaatcacaagcccagcaacaccaaggtggacaagagagtg

SEQ ID NO: 2384 - DNA, 648 bp, Artificial Sequence
  Synthetic polynucleotide encoding artificial human antibody VH chain
caggtgcagctggtggagtctgggggaggcgtggtccagcctgggacgtccctgacactgtcctgtgaagcgtctggattcaccttcaatagatatggcatgcactgggtccgtcaggctccaggcaaggggctggaatgggtggcagtaatatggtatgatggaaccaacaagtattatgctgactccgtgaggggccgattcaccatctccagagacaattccaagaacaccctttatctgcaaatgaacacactgagaggcgacgacacggctgtgtacttttgtgcgggtgcccacggtgactacggtcttgactattggggccagggaaccctggtcaccgtctcctcagcctccaccaagggcccatcggtcttccccctggcaccctcctccaagagcacctctgggggcacagcggccctgggctgcctggtcaaggactacttccccgaaccggtgacggtgtcgtggaactcaggcgccctgaccagcggcgtgcacaccttcccggctgtcctacagtcctcaggactctactccctcagcagcgtggtgaccgtgccctccagcagcttgggcacccagacctacatctgcaacgtgaatcacaagcccagcaacaccaaggtggacaagagagag

SEQ ID NO: 2385 - DNA, 660 bp, Artificial Sequence
  Synthetic polynucleotide encoding artificial human antibody VH chain
gaagtgcagctggtgcagtctggagcagaggtgaaaaagcccggggagtctctgaggatctcctgtaagggttctggatacagctttaccagcttctggatcagctgggtgcgccagatgcccgggaaaggcctggagtggatggggaggattgatcctagtgactcttataccaactacagcccgtccttccaaggccacgtcaccatctcagctgacaagtccatcagcactgccttcctgcagtggagcagcctgaaggcctcggacaccgccatgtattactgtgcgagacatcagcagaagtatagccccatttccccgcttgactactggggccagggaaccctggtcaccgtctcctcagcctccaccaagggcccatcggtcttccccctggcaccctcctccaagagcacctctgggggcacagcggccctgggctgcctggtcaaggactacttccccgaaccggtgacggtgtcgtggaactcaggcgccctgaccagcggcgtgcacaccttcccggctgtcctacagtcctcaggactctactccctcagcagcgtggtgaccgtgccctccagcagcttgggcacccagacctacatctgcaacgtgaatcacaagcccagcaacaccaaggtggacaagagagtt

SEQ ID NO: 2386 - DNA, 360 bp, Artificial Sequence
  Synthetic polynucleotide encoding artificial human antibody VH chain
gaagtgcagctggtggagtcggggggaggcgtgatcaagcctggggggtccctgaaactctcctgtgaaggctctggattcaccctggatgattatgtcatgcactgggtccgtcaggctccagggaagggtctggagtggatctcttctattagtggggatggtactcggacatattatgcagactctgtgaagggccgattcaccatctccagaaacaacggcaaaaattccctgtatctgcaaatggacagtctgagaagggaagacaccgccttgtattactgtgcaaaagacgcacgcctggcttattatggtatggacgtctggggccaagggaccacggtcaccgtctcctca

SEQ ID NO: 2387 - DNA, 364 bp, Artificial Sequence
  Synthetic polynucleotide encoding artificial human antibody VH chain
cagctgcagctgcaggagtcgggcccaggactggtgaagccttcggagaccctgtccctcacctgcactgtctctggtgactccatcagtagtagcggtttcttctgggcctggatccgccaggccccagggaagggcctggactggattggcagcacttatcatcgcacaactaccacctactacaacccgtccctcaagagtcgagtcaccatatccgtagacacgtccaagaaccagttctccctgaccctgaactctctgaccgccgcagacacggctgtctattactgtgcgagacactcgagtggttattcagaacttgcctactggggccagggaaccctggtcatcgtctccacag

SEQ ID NO: 2388 - DNA, 669 bp, Artificial Sequence
  Synthetic polynucleotide encoding artificial human antibody VH chain
caggagcaactggtgcagtctggggctgaggtgaagaagcctgggtcgtcggtgaaggtctcctgcaaggtttctggaggccccttcaagacctaccctatcaactgggtgcgacaggcccctggacaagggcttgagtggatgggagggatcacccctaattctggcacaccaaactacgcccagaagttccagggcagagtcacaattaccgcggacgaatccacgactacagtctacatgcaactgagcagcctgagatctgaggacacggccgtgtattactgtgcgagagtccacaattgggacttctactacggtatggacgtctggggcctagggaccacggtcaccgtctcctcagcatccccgaccagccccaaggtcttcccgctgagcctctgcagcacccagccagatgggaacgtggtcatcgcctgcctggtccagggcttcttcccccaggagccactcagtgtgacctggagcgaaagcggacagggcgtgaccgccagaaacttcccacccagccaggatgcctccggggacctgtacaccacgagcagccagctgaccctgccggccacacagtgcctagccggcaagtccgtgacatgccacgtgaagcactacacgaatcccagccaggatgtgactgtgccctgccca

SEQ ID NO: 2389 - DNA, 678 bp, Artificial Sequence
  Synthetic polynucleotide encoding artificial human antibody VH chain
gaggtgcaggtggtggagtctgggggaggcttggtacagccagggcggtccctgagactctcctgtacaccttctggattcacctttggtgataatgctatgggctggttccgccaggctccagggaaggggctggagtgggtaggtttcattagaagcaaagcttatggtgggacaagagactacgccgcgtctgtgaaaggcagattcaccatctcaagagatgactccaaaagcatcgcctatctgcaaatgaacagcctgaaaaccgaggacacagccgtttattactgtactagagagaggccccctaattgtggatctagctgccccgagacctggggccagggaaccctggtcaccgtctcttcagcatccccgaccagccccaaggtcttcccgctgagcctctgcagcacccagccagatgggaacgtggtcatcgcctgcctggtccagggcttcttcccccaggagccactcagtgtgacctggagcgaaagcggacagggcgtgaccgccagaaacttcccacccagccaggatgcctccggggacctgtacaccacgagcagccagctgaccctgccggccacacagtgcctagccggcaagtccgtgacatgccacgtgaagcactacacgaatcccagccaggatgtgactgtgccctgccca

SEQ ID NO: 2390 - DNA, 358 bp, Artificial Sequence
  Synthetic polynucleotide encoding artificial human antibody VH chain
caggttcagctggtacagtctggaagtgaggtgaagaagcctggggcctccgtgaggctcgcctgcaagacctctggttacacctttagtaattacggtgtctcctgggtgcgacagggccctggccgaggacttgagtggctgggctggataagcggttacaatggaagaacacactctgcagacaagtttcgggacagagtcaccctgaccacagacacatccacaaccacagtctacgtggacctgaagaacctgacctctgacgacacggccgtgtattattgtgcgagagtcgggacatctcattggtactctgattcttggggccagggaaccctggtcaccgtctcctcag

SEQ ID NO: 2391 - DNA, 352 bp, Artificial Sequence
  Synthetic polynucleotide encoding artificial human antibody VH chain
gaggtacagttggtggagtctgggggagggatggtccagcctggggaatcactcagactctcgtgcgcagcctctggattcgactttacttcgtattggatggcctgggtccgccaggctccagggaaggggctggagtgggtggccaatatgaacgcagatgggagtgagaaacactatgtggactctgtgaaggggcgattcagcatatccagagacaacgcgaagaagttactgtttctgcaaatgaacagcctgacagttgacgatacaggtgtctattattgtgcgagagacgaggggcgaagagagggcgcctggggccagggaacccaggtcatcgtttccgctg

SEQ ID NO: 2392 - DNA, 658 bp, Artificial Sequence
  Synthetic polynucleotide encoding artificial human antibody VH chain
gtgtgaggtgcagctggtggagtctgggggaggcttggtacagcctggggggtccctgagactctcctgtgcagcctctggattcaccttcagtagctatagcatgaactgggtccgccaggctccagggaaggggctggagtgggtttcatacattagtagtagtagtagtaccatatactacgcagactctgtgaagggccgattcaccatctccagagacaatgccaagaactcactgtatctgcaaatgaacagcctgagagccgaggacacggctgtgtattactgtgcgagagatatcgcgctgggacggggcggtatggacgtctggggccaagggaccacggtcaccgtctcctcagggagtgcatccggcccatcggtcttccccctggcaccctcctccaagagcacctctgggggcacagcggccctgggctgcctggtcaaggactacttccccgaaccggtgacggtgtcgtggaactcaggcgccctgaccagcggcgtgcacaccttcccggctgtcctacagtcctcaggactctactccctcagcagcgtggtgaccgtgccctccagcagcttgggcacccagacctacatctgcaacgtgaatcacaagcccagcaacaccaaggtggacaagaatgtg

SEQ ID NO: 2393 - DNA, 361 bp, Artificial Sequence
  Synthetic polynucleotide encoding artificial human antibody VH chain
cagctgcaactgcaggagtcgggcccaggactggtgaagccttcggagaccctgtccctcacctgcactgtctctggtgtctccatcggcaccagtagttactattggggctggatccgccagccccctgcgaagggtctggagtggattgggagtatctactatagtgggagcacctactacaacccgtccctcaagaatcgagtcaccatatcagtagacacgtccaagaaccacttctccctgaagctgagctctgtgaccgccgcagacacggctgtgtattactgtgcgagacatagaacgggccaatattactataatagttggggccagggaaccctggtcaccgtctcctcag

SEQ ID NO: 2394 - DNA, 354 bp, Artificial Sequence
  Synthetic polynucleotide encoding artificial human antibody VH chain
cccaggtgcagctgcaggagtcgggcccaggactggtgaagccttcggagaccctgtcactcacctgctctgtctctggtgactccttcagtgattactactggagctggacccgtcagtccccagggaagggactagagtggcttggttatatgttttatggtgggagcaccaactacaacccctccctcaagagtcgactcaccatgtcagtagacacgtccaagaaacacgtctacctgaagttgagctctgtgaccgctgcggacacggccgtgtattattgtgcggcgtccggctacggtgaccacgtggcctactggggccagggaaccctagtcaccgtctcctccg

SEQ ID NO: 2395 - DNA, 663 bp, Artificial Sequence
  Synthetic polynucleotide encoding artificial human antibody VH chain
caggtgcagctggtggagtctgggggaggcgtagtccagcctgggaggtccctgagactctcctgtgtagcgtctggattcaccttcagtaattatgccatgcactgggtccgccaggctccaggcaaggggctggagtgggtggcagttatatggtatgatggaagtaatgaatactatagagactccgtggagggccgattcaccatctccagagacagttccaagaatactctgtatctgctagtgaacagcctgagagccgaggacacggctgtctattattgtgcgagagggaatggacctaagagtgggaagtactcggactttgactactggggccagggaaccctggtcaccgtctcctcagcctccaccaagggcccatcggtcttccccctggcaccctcctccaagagcacctctgggggcacagcggccctgggctgcctggtcaaggactacttccccgaaccggtgacggtgtcgtggaactcaggcgccctgaccagcggcgtgcacaccttcccggctgtcctacagtcctcaggactctactccctcagcagcgtggtgaccgtgccctccagcagcttgggcacccagacctacatctgcaacgtgaatcacaagcccagcaacaccaaggtggacaagagtgag

SEQ ID NO: 2396 - DNA, 352 bp, Artificial Sequence
  Synthetic polynucleotide encoding artificial human antibody VH chain
caggttcagctggtgcaatctggaactgaggtgaagaagcctggggcctcagtgaaggtctcctgcaaggcttctggttacagatttaccagcaatggtatcagttgggtgcgacaggctcctggacaagggcttcagtggatgggatggatcagcactgacagtggtaacacaaattacgcacagagcttccagggcagagtcaccttgaccagagacacatccacgaacacagcctatctggaactcaggagactaagatctgaggacacggccgtgtattattgtgcgagagataagtcctggtactttgactactggggccagggaaccctggtcagcgtctcctcag

SEQ ID NO: 2397 - DNA, 664 bp, Artificial Sequence
  Synthetic polynucleotide encoding artificial human antibody VH chain
gtgtgaggtgcagctggtggagtctgggggaggtgtggtacggcctggggggtccctgagactctcctgtgcagcctctggattcacctttgatgattatggcatgagctgggtccgccaagctccagggaaggggctggagtgggtctctggtattcattggaatggtggtagcacaggttatgcagactctgtgaagggccgattcaccatctccagagacaacgccaagaactccctgtatctgcaaatgaacagtctgagagccgaggacacggccttgtatcactgtgcgagatccaccgctagtagtggttattatgatgcttttgatatctggggccaagggacaatggtcaccgtctcttcagcctccaccaagggcccatcggtcttccccctggcaccctcctccaagagcacctctgggggcacagcggccctgggctgcctggtcaaggactacttccccgaaccggtgacggtgtcgtggaactcaggcgccctgaccagcggcgtgcacaccttcccggctgtcctacagtcctcaggactctactccctcagcagcgtggtgaccgtgccctccagcagcttgggcacccagacctacatctgcaacgtgaatcacaagcccagcaacaccaaggtggacaagagtgag

SEQ ID NO: 2398 - DNA, 681 bp, Artificial Sequence
  Synthetic polynucleotide encoding artificial human antibody VH chain
caggtgcagctggtggagtctgggggaggcgtggtccagcctgggaggtccctgagactctcctgtgcagcgtctggattcagtttcagtgcctatggcatgcactgggtccgccaggctccaggcaaggggctggagtgggtggcaattatgtggtatgatggaaataataaatactatgcagactccgtgaagggccgattcaccatctccagagacaattccaagaacacgctatatctgcaaatgaacagcctgagagccgaggacacggctgtgtattactgtgcgagagatcgtcgagagtatagcagctcgtcccggccttcatatcactactactacatggacgtctggggcaaagggaccacggtcaccgtctcctcagcctccaccaagggcccatcggtcttccccctggcaccctcctccaagagcacctctgggggcacagcggccctgggctgcctggtcaaggactacttccccgaaccggtgacggtgtcgtggaactcaggcgccctgaccagcggcgtgcacaccttcccggctgtcctacagtcctcaggactctactccctcagcagcgtggtgaccgtgccctccagcagcttgggcacccagacctacatctgcaacgtgaatcacaagcccagcaacaccaaggtggacaagagtgag

SEQ ID NO: 2399 - DNA, 654 bp, Artificial Sequence
  Synthetic polynucleotide encoding artificial human antibody VH chain
gtggtgcagctgttggagtctgggggaggcttggtacaccctggggggtccctgagaatttcctgtgcagcctctgaattcacctttagcgcctatgccatgacctgggtccgccaggctccagggaaggggctggagtgggtctcggctattagtggcagtggtggtcggacatactacgcagactccctgaagggccggttcaccatctccagagacaattccaagcacactctgtatctcctaatgaatagtctgagagtcgaggacacggccgtttattactgtgcgtcccgatatagaagcccgtccggtgcttttgacatctggggccaagggacattggtcaccgtctcttcagcctccaccaagggcccatcggtcttccccctggcaccctcctccaagagcacctctgggggcacagcggccctgggctgcctggtcaaggactacttccccgaaccggtgacggtgtcgtggaactcaggcgccctgaccagcggcgtgcacaccttcccggctgtcctacagtcctcaggactctactccctcagcagcgtggtgaccgtgccctccagcagcttgggcacccagacctacatctgcaacgtgaatcacaagcccagcaacaccaaggtggacaagagagtc

SEQ ID NO: 2400 - DNA, 645 bp, Artificial Sequence
  Synthetic polynucleotide encoding artificial human antibody VH chain
gaggtgcagctggtggagtctgggggaggcttggtaaagcctggggggtcccttagactctcctgtgcagcctctggtttcactttcagtaacgcctggatgaactgggtccgccagactccagggaaggggctggagtgggtcggccgtattaaaaccaaaactgatggtgggacaacagactacgctgaacccgtaaaaggcagattcaccatctcaagagatgattcaaaaaacacgctatatctgcaaatgaacagcctgaaaaccgaggacacagccgtgtattattgtaccagaggagcagtggccgactactggggccagggaacccaggtcaccgtctcctcagcctccaccaagggcccatcggtcttccccctggcaccctcctccaagagcacctctgggggcacagcggccctgggctgcctggtcaaggactacttccccgaaccggtgacggtgtcgtggaactcaggcgccctgaccagcggcgtgcacaccttcccggctgtcctacagtcctcaggactctactccctcagcagcgtggtgaccgtgccctccagcagcttgggcacccagacctacatctgcaacgtgaatcacaagcccagcaacaccaaggtggacaagagagtc

SEQ ID NO: 2401 - DNA, 657 bp, Artificial Sequence
  Synthetic polynucleotide encoding artificial human antibody VH chain
caggtgcagctgaagcagtcggggggaggcgtggtccagcctgggaggtccctgacactctcctgtgtagcgtctggactcaccttcagtgactatggcatgcactgggtccgccaggctccaggcaaggggctggagtgggtggccgttatttggcatgatggcagtaagacgaattatgcagactccgtgaagggccgaatcatcatctccagagacaactccaagagcacggtgtatttgcaaatgaacagattgagaggcgaggacacggctgtgtattactgtgcgacctcccacggaggactagtgcctggcggcgaaaactactggggccagggaaccctggtcaccgtctcctcagcctccaccaagggcccatcggtcttccccctggcaccctcctccaagagcacctctgggggcacagcggccctgggctgcctggtcaaggactacttccccgaaccggtgacggtgtcgtggaactcaggcgccctgaccagcggcgtgcacaccttcccggctgtcctacagtcctcaggactctactccctcagcagcgtggtgaccgtgccctccagcagcttgggcacccagacctacatctgcaacgtgaatcacaagcccagcaacaccaaggtggacaagagagtc

SEQ ID NO: 2402 - DNA, 370 bp, Artificial Sequence
  Synthetic polynucleotide encoding artificial human antibody VH chain
caggttcagctggtgcagtcgggatctgagttgaagaagcctggggcctcagtgaaggtctcctgcacaagttccggttacgtctttaccagctttggggtcagctgggtgcgacaggtcccgggacaagggcctgagtggatgggatggattagcccttacacccgtcagacaaaatatgcacagagtctccagggcagaatcaccctgaccgcagacacatccacaaatacgacttacatggaactgaggagcctgagatctgacgacacggccatgtattactgtgtgagagaggagtttggagtggttcgtggacctaatccctttgatgtctggggccaggggacaatggtcaccgtctcttcag

SEQ ID NO: 2403 - DNA, 672 bp, Artificial Sequence
  Synthetic polynucleotide encoding artificial human antibody VH chain
gaggtgcagctggtggagtcggggggaggcgtggtccagcctggggggtccctgagactctcctgtgcagcgtctggattcaccttcgaagacttcggcatgcactgggtccgccaggctccaggcaaggggctggagtgggtggcatttacacgttttgatggaagtgaaaaatattatgtcgactccgtgaagggccgattcaccgtctccagagacaattccaagaatacactttttctacatatgaacagcctgagaccggaagacacggctgtatattactgtgcgaaaacccgttcttatagttccgctgacactactcgtcccaatgccccgggctactggggccagggaaccctggtcaccgtctcctcagcctccaccaagggcccatcggtcttccccctggcaccctcctccaagagcacctctgggggcacagcggccctgggctgcctggtcaaggactacttccccgaaccggtgacggtgtcgtggaactcaggcgccctgaccagcggcgtgcacaccttcccggctgtcctacagtcctcaggactctactccctcagcagcgtggtgaccgtgccctccagcagcttgggcacccagacctacatctgcaacgtgaatcacaagcccagcaacaccaaggtggacaagagagtc

SEQ ID NO: 2404 - DNA, 660 bp, Artificial Sequence
  Synthetic polynucleotide encoding artificial human antibody VH chain
caggtgcagctggtggaatctgggggaggcgtggtccagcctgggaggtccctgagactctcctgtgcagcctctggattcaccctcagtacctatggcatgcactgggtccgccaggctccaggcaaggggctggagtgggtggcagttatatcacatgatggaagtaataactactatgcagactacgtgaagggccgattcaccatctccagagacaattccaagaacacgctgtacctgcaaatgaacagcctgagaattgaggacacggctgtgtattactgtgcgaaagatggccaaactggaactacaaccccatactttgactactggggccagggaaccctggtcaccgtctcctcagcctccaccaagggcccatcggtcttccccctggcgccctgctccaggagcacctccgagagcacagcggccctgggctgcctggtcaaggactacttccccgaaccggtgacggtgtcgtggaactcaggcgctctgaccagcggcgtgcacaccttcccggctgtcctacagtcctcaggactctactccctcagcagcgtggtgaccgtgacctccagcaacttcggcacccagacctacacctgcaacgtagatcacaagcccagcaacaccaaggtggacaagacagtg

SEQ ID NO: 2405 - DNA, 657 bp, Artificial Sequence
  Synthetic polynucleotide encoding artificial human antibody VH chain
cccgtccagcttgtgcagtctggggcccaggtgaagaagcctggggcctcagtgaggctttcctgcaagtcttctggatataccttcagtaactatgctatacattggctgcgccaggcccccggacagaggcttgagtgggtggggtggatccacgttggaaatgatcacacaagatattcacagagtttccagggcagagtcaccatttccgcagatacatccgcgaacacggcctacatggaggtgagaggcctgcgatctgaagacacgtctctgttttactgtgcgagagccggggctgagggcgttgactattggggccagggaacccaggtgaccgtctcctcagcatccccgaccagccccaaggtcttcccgctgagcctctgcagcacccagccagatgggaacgtggtcatcgcctgcctggtccagggcttcttcccccaggagccactcagtgtgacctggagcgaaagcggacagggcgtgaccgccagaaacttcccacccagccaggatgcctccggggacctgtacaccacgagcagccagctgaccctgccggccacacagtgcctagccggcaagtccgtgacatgccacgtgaagcactacacgaatcccagccaggatgtgactgtgccctgccca

SEQ ID NO: 2406 - DNA, 657 bp, Artificial Sequence
  Synthetic polynucleotide encoding artificial human antibody VH chain
gcagtgcagctggtgcagtctggagcagaggtgaaaaagcccggggagtctctgaggatctcctgtaagggttctggatacagcttttccacctactggatcatctgggtgcgccagatgcccgggaaaggcctagagtggattgggaggtttgatcctagtgactcttataacgtcaacagcccgtccttccaaggccacgtcaccatctcagctgacacgtccatcaacactgcctacttgcagtggagcagcctgaaggcctcggacagcgccatgtattactgtgcgagacgatccgataaagcagtgcctgggacctttgaccagtggggccagggaaccctggtcaccgtctcctcagcctccaccaagggcccatcggtcttccccctggcgccctgctccaggagcacctccgagagcacagcggccctgggctgcctggtcaaggactacttccccgaaccggtgacggtgtcgtggaactcaggcgctctgaccagcggcgtgcacaccttcccggctgtcctacagtcctcaggactctactccctcagcagcgtggtgaccgtgccctccagcaacttcggcacccagacctacacctgcaacgtagatcacaagcccagcaacaccaaggtggacaagacagtg

SEQ ID NO: 2407 - DNA, 663 bp, Artificial Sequence
  Synthetic polynucleotide encoding artificial human antibody VH chain
cagatcaccctgaaggagtctggtcctacgctgctgaaacccacacagaccctcacgctgacctgcaacttctctgggttctcactcaccacatatggagtgggtgtggcctggatccgtcagcccccaggaaaggccctggagtggcttgcactcatttattgggatgatgataagcgctacagcccatctctgaagagcagactcaccgtcaccaaggacacctccaaaaaccaggtggtccttacaatgaccaacatggaccctgtggacacagccacatattactgtgcacacagggggggaaagaaccctcgttattggtacttcgatctctggggccgcggcactctggtcactgtctcctcagcctccaccaagggcccatcggtcttccccctggcaccctcctccaagagcacctctgggggcacagcggccctgggctgcctggtcaaggactacttccccgaaccggtgacggtgtcgtggaactcaggcgccctgaccagcggcgtgcacaccttcccggctgtcctacagtcctcaggactctactccctcagcagcgtggtgaccgtgccctccagcagcttgggcacccagacctacatctgcaacgtgaatcacaagcccagcaacaccaaggtggacaagaaagtg

SEQ ID NO: 2408 - DNA, 654 bp, Artificial Sequence
  Synthetic polynucleotide encoding artificial human antibody VH chain
gaggtacagctggtggagtctggtggaggcctggtcaagcctagggggtccctgagactctcctgtgcagcctctggattcaccttcagtgcttatggcatgaactgggttcgccaggctccagggaagggactggagtgggtctcatccattagtggagatagtcgtgacatctactatggagcctctatgaagggccgattcaccatctccagagacaacgccaagagctcactgtatctgcaaatgaacagcctgagagccgaggacacggctgtttattactgtgcgagaggggaggggggggaattatgggcctttgactactggggcctgggagtcctggtcaccgtctcctcagcctccaccaagggcccatcggtcttccccctggcaccctcctccaagagcacctctgggggcacagcggccctgggctgcctggtcaaggactacttccccgaaccggtgacggtgtcgtggaactcaggcgccctgaccagcggcgtgcacaccttcccggctgtcctacagtcctcaggactctactccctcagcagcgtggtgaccgtgccctccagcagcttgggcacccagacctacatctgcaacgtgaatcacaagcccagcaacaccaaggtggacaagaaagcc

SEQ ID NO: 2409 - DNA, 657 bp, Artificial Sequence
  Synthetic polynucleotide encoding artificial human antibody VH chain
cccgtgcagctggtgcagtctggggctgaggtgaagaagcctgggtcctcggtgcaggtctcctgcaagggttctggaggcaccttcagcgaatatggtatcagctggttgcgacaggcccctggacaagggcttgagtggattggaggaatcatacctgtcctaggtataccaaattacgcacaaaaattccggggcagagtcaccattaccgcggacgaatccacgggctcagcctacatggaggtgagcagcctcagatctgaagacacggccgtttattactgtgcgagagaggggcttcgtctggcacgtggctggtttcacccctggggccagggaaccctcgtcaccgtcacctcagcctccaccaagggcccatcggtcttccccctggcaccctcctccaagagcacctctgggggcacagcggccctgggctgcctggtcaaggactacttccccgaaccggtgacggtgtcgtggaactcaggcgccctgaccagcggcgtgcacaccttcccggctgtcctacagtcctcaggactctactccctcagcagcgtggtgaccgtgccctccagcagcttgggcacccagacctacatctgcaacgtgaatcacaagcccagcaacaccaaggtggacaagagtgag

SEQ ID NO: 2410 - DNA, 361 bp, Artificial Sequence
  Synthetic polynucleotide encoding artificial human antibody VH chain
caggtgcaactgcaagagtcgggcccaggactggtgaagccttcggagaccctgtccctcatctgcactgtctctggtgcctccgtcaacagtgggactcacttctggagctggatccggcagcccccagggaagggactggagtggattggctatgtctattacagtgggaacaccaattacaatccctccctcaagagccgagtcgccatatcagttgacacgtccaagaaccagttctccctgaagctgacctctgtgacctctgcggacacggccgtgtattactgtgcgagagattttgatgatggctacgacatccgttactggggccagggaacccgggtcagcgtctcctcag

SEQ ID NO: 2411 - DNA, 654 bp, Artificial Sequence
  Synthetic polynucleotide encoding artificial human antibody VH chain
gtggtgcagctggtggagtctgggggaggcttggtccagcctggggggtccctgagactctcctgttcagcctctggattcaccttcagtagctatgctatgcactgggtccgccaggctccagggaagggactggaatatgtttcagctattagtagtaatgggggtagcacatactacgcagactccgtgaagggcagattcaccatctccagagacaattccaagaacacgctgtatcttcaaatgagcagtctgagagctgaggacacggctgtgtattactgtgtgaaatcaccagtggccgcaaatgatgcttttgatatctggggccaagggacaatggtcaccgtctcttcagcctccaccaagggcccatcggtcttccccctggcaccctcctccaagagcacctctgggggcacagcggccctgggctgcctggtcaaggactacttccccgaaccggtgacggtgtcgtggaactcaggcgccctgaccagcggcgtgcacaccttcccggctgtcctacagtcctcaggactctactccctcagcagcgtggtgaccgtgccctccagcagcttgggcacccagacctacatctgcaacgtgaatcacaagcccagcaacaccaaggtggacaagagtgtg

SEQ ID NO: 2412 - DNA, 658 bp, Artificial Sequence
  Synthetic polynucleotide encoding artificial human antibody VH chain
gtgtgaggtgcagctggtggagtctgggggaggcttggtacagcctggggggtccctgagactctcctgtgtagcctctggattcaccttcagtagctatagcatgaactgggtccgccaggctccagggaaggggctgaagtgggtttcatacattagtagtagtaggagtaccatatacaacgcagactctgtgaagggccgattcaccatctccagagacaatgccaagaagtcactgtatctgcaaatgaacagcctgagagccgaggacacggctgtgtattactgtgcgagagtgtctgtggccgccccaacgtgcttggactactggggccagggaaccctggtcaccgtctcctcagcctccaccaagggcccatcggtcttccccctggcaccctcctccaagagcacctctgggggcacagcggccctgggctgcctggtcaaggactacttccccgaaccggtgacggtgtcgtggaactcaggcgccctgaccagcggcgtgcacaccttcccggctgtcctacagtcctcaggactctactccctcagcagcgtggtgaccgtgccctccagcagcttgggcacccagacctacatctgcaacgtgaatcacaagcccagcaacaccaaggtggacaagaaggtg

SEQ ID NO: 2413 - DNA, 663 bp, Artificial Sequence
  Synthetic polynucleotide encoding artificial human antibody VH chain
cagctgcagctgcaggagtcgggcccaggactggtgaagccttcggagaccctgtccctcacctgcactgtcgctggtgactccatcagcaggagtaattactactgggcctggatccgccagcccccagggaaggggctggagtggattgggagtatcattcatactgggaccacctaccacaacccgtccctcaggagtcgcggcaccattttggtagacacgtccaagaaccaattctccctgaaactgagctctgtgaccgccgcagacacgggtctatattactgtgcgagacattcagggcacgatcagttgccgctagactttgacaactggggccagggaaccctggtcaccgtctcctcagcctccaccaagggcccatcggtcttccccctggcaccctcctccaagagcacctctgggggcacagcggccctgggctgcctggtcaaggactacttccccgaaccggtgacggtgtcgtggaactcaggcgccctgaccagcggcgtgcacaccttcccggctgtcctacagtcctcaggactctactccctcagcagcgtggtgaccgtgccctccagcagcttgggcacccagacctacatctgcaacgtgaatcacaagcccagcaacaccaaggtggacaagagtgag

SEQ ID NO: 2414 - DNA, 349 bp, Artificial Sequence
  Synthetic polynucleotide encoding artificial human antibody VH chain
gaggtgcaactggttgagtccgggggaggcttagttcagccgggggggtccctgagactctcctgtgcagcctctggattcacctttagtaagttttggatgcactgggtccgccaagctccagggaaggggctggtgtggctctcacgtattaatactgatgggactgtcacaacctacgcggactccgtgaagggccggttcaccatctccagagacaacgccaagagcacgctgtatctgcaaatgaacagtctgagagtcgaggacacggctgtttattattgtgcaggaggaggaagtcaagtggacttctggggccagggaaccctggtcaccgtctcctcag

SEQ ID NO: 2415 - DNA, 671 bp, Artificial Sequence
  Synthetic polynucleotide encoding artificial human antibody VH chain
cccagatcaccttgaaggagtctggtcctacgctggtgaaacccacacagaccctcacgctgacctgcaccttctctgggttctctctgaccactactggagtgggtgtgggctggatccgtcagcccccaggaaaggccctggagtggcttgcactcatttattgggatgatgataagcgctacagcccatctctgaagagcaggctcatcatcaccaaggacacctccaaaaaccaggtggtccttacaatgaccaacatggaccctgtggacacagccacatattactgtgcacacagattcgggagaggggtgtcctactactactacggtatggacgtctggggccaagggaccacggtcaccgtctcctcagcctccaccaagggcccatcggtcttccccctggcaccctcctccaagagcacctctgggggcacagcggccctgggctgcctggtcaaggactacttccccgaaccggtgacggtgtcgtggaactcaggcgccctgaccagcggcgtgcacaccttcccggctgtcctacagtcctcaggactctactccctcagcagcgtggtgaccgtgccctccagcagcttgggcacccagacctacatctgcaacgtgaatcacaagcccagcaacaccaaggtggacaagaaggtg

SEQ ID NO: 2416 - DNA, 651 bp, Artificial Sequence
  Synthetic polynucleotide encoding artificial human antibody VH chain
caggtgcagctggtggagtctgggggaggcgtggtccagcctgggaggtccctgagactctcctgtgcagcctctggattcatcttcagtagctatggcatgcactgggtccgccaggctccaggcaaggggctggagtgggtggcagttatatcatatgatggaagtaataaatactatgcagactccgtgaagggccgattcaccatctccagagacaaatccaagaacacgctgcatctgcaaatgaacagcctgagagctgaggacacggctgtgtattactgtgcgaaagatagtgggagcaacgacgacatggacgtctggggcaaggggaccacggtcaccgtctcctcagcctccaccaagggcccatcggtcttccccctggcaccctcctccaagagcacctctgggggcacagcggccctgggctgcctggtcaaggactacttccccgaaccggtgacggtgtcgtggaactcaggcgccctgaccagcggcgtgcacaccttcccggctgtcctacagtcctcaggactctactccctcagcagcgtggtgaccgtgccctccagcagcttgggcacccagacctacatctgcaacgtgaatcacaagcccagcaacaccaaggtggacaagagtgag

SEQ ID NO: 2417 - DNA, 658 bp, Artificial Sequence
  Synthetic polynucleotide encoding artificial human antibody VH chain
gtgtgaggtgcagctggtggagtctgggggaggcttggtacagcctggagggtccctgagactctcctgtgcagcctctggattcaccttcagtagttatgaaatgaactgggtccgccaggctccagggaaggggctggagtgggtttcatacattagtagtagtggtagtaccatatactacgcagactctgtgaagggccgattcaccatctccagagacaacgccaagaactcactgtatctgcaaatgaacagcctgagagccgaggacacggctgtttattactgtgcgagaagaggtttttactactactacggtatggacgtctggggccaagggaccacggtcaccgtctcctcagcctccaccaagggcccatcggtcttccccctggcaccctcctccaagagcacctctgggggcacagcggccctgggctgcctggtcaaggactacttccccgaaccggtgacggtgtcgtggaactcaggcgccctgaccagcggcgtgcacaccttcccggctgtcctacagtcctcaggactctactccctcagcagcgtggtgaccgtgccctccagcagcttgggcacccagacctacatctgcaacgtgaatcacaagcccagcaacaccaaggtggacaagagtgag

SEQ ID NO: 2418 - DNA, 649 bp, Artificial Sequence
  Synthetic polynucleotide encoding artificial human antibody VH chain
gtgtgaggtgcagctggtggagtctgggggaggcttggtacagcctggggggtccctgagactctcctgtgcagcctctggattcaccttcagtagctatagcatgaactgggtccgccaggctccagggaaggggctggagtgggtttcatacattagtagtagtagtagtaccatatactacgcagactctgtgaagggccgattcaccatctccagagacaatgccaagaactcactgtatctgcaaatgaacagcctgagagccgaggacacggctgtgtattactgtgcgagtctcctcgggggcgatcctgactactggggccagggaaccctggtcaccgtctcctcagcctccaccaagggcccatcggtcttccccctggcaccctcctccaagagcacctctgggggcacagcggccctgggctgcctggtcaaggactacttccccgaaccggtgacggtgtcgtggaactcaggcgccctgaccagcggcgtgcacaccttcccggctgtcctacagtcctcaggactctactccctcagcagcgtggtgaccgtgccctccagcagcttgggcacccagacctacatctgcaacgtgaatcacaagcccagcaacaccaaggtggacaagaaggtg

SEQ ID NO: 2419 - DNA, 678 bp, Artificial Sequence
  Synthetic polynucleotide encoding artificial human antibody VH chain
cccgtcaccttgagggagtctggtcctgcgctggtgaaacccacacagaccctcacactgacctgcaccttctctgggttctcactcagcactagtggaatgtgtgtgagctggatccgtcagcccccagggaaggccctggagtggcttgcacgcattgattgggatgatgataaatactacagcacatctctgaagaccaggctcaccatctccaaggacacctccaaaaaccaggtggtccttacaatgaccaacatggaccctgtggacacagccacgtattactgtgcacggatgcaaatagtggctacgacacagacctactactactactacggtatggacgtctggggccaagggaccacggtcaccgtctcctcagcctccaccaagggcccatcggtcttccccctggcaccctcctccaagagcacctctgggggcacagcggccctgggctgcctggtcaaggactacttccccgaaccggtgacggtgtcgtggaactcaggcgccctgaccagcggcgtgcacaccttcccggctgtcctacagtcctcaggactctactccctcagcagcgtggtgaccgtgccctccagcagcttgggcacccagacctacatctgcaacgtgaatcacaagcccagcaacaccaaggtggacaagagtgag

SEQ ID NO: 2420 - DNA, 654 bp, Artificial Sequence
  Synthetic polynucleotide encoding artificial human antibody VH chain
gaggtgcagctggtggagtctgggggaggcttggtccagcctggggggtccctgagactctcctgtgcagcctctggattcacctttagtagctattggatgacctgggtccgccaggctccagggaaggggctggagtgggtggccaacataaagcaagatggaagtgagaaatactatgtggactctgtgaagggccgattcaccatctccagagacaattccaagaactcgctgtatctgcaaatgaacagcctgagagctgaggacacggctgtgtattactgtgcgagagcgggctacgatcttttcggctggttcgacccctggggccagggaaccctggtcaccgtctcctcagcctccaccaagggcccatcggtcttccccctggcaccctcctccaagagcacctctgggggcacagcggccctgggctgcctggtcaaggactacttccccgaaccggtgacggtgtcgtggaactcaggcgccctgaccagcggcgtgcacaccttcccggctgtcctacagtcctcaggactctactccctcagcagcgtggtgaccgtgccctccagcagcttgggcacccagacctacatctgcaacgtgaatcacaagcccagcaacaccaaggtggacaagaagttg

SEQ ID NO: 2421 - DNA, 376 bp, Artificial Sequence
  Synthetic polynucleotide encoding artificial human antibody VH chain
gaggtgcagctgttggagtctgggggaggcttggtacagcctgggggatccctgagactctcctgtgtagcctctggattcacctttgccagctatggcatggcctgggtccgccaggctccagggcaggggctgacctggatctgttttgttggtagcggtgacaccacacactacgcggagtccgtgaagggccgcttcacctgttccagagacaactccaacaatacactttatctccatatgagcggtctgagaggcgcagacacggccaaatattactgtgcgaaacccaactcccctttcactggcagtggaagtttccacaactactttgactactggggccagggcgcgctggtcatcgtctcctcag

SEQ ID NO: 2422 - DNA, 342 bp, Artificial Sequence
  Synthetic polynucleotide encoding artificial human antibody VH chain
gtgaggtgcaggtggtggagtctgggggaggcttgggacagcctggggggtccctgagactctcctgtgcagcctctggattcaccttcagtagctatagtatgaactgggtccgccaggctccagggaaggggctggagtgggtttcatacattagtagtagtagtagtaccaaatactacgcagactctgtgaagggccgattcaccatctccagagacaatgccaagaaatcactgtatctgcaaatgaacagcctgagagacgaggacacggctgtgtattactgtgcgagtcccgttcgaccctggggccagggaaccctggtcaccgtctcctcag

SEQ ID NO: 2423 - DNA, 678 bp, Artificial Sequence
  Synthetic polynucleotide encoding artificial human antibody VH chain
caggtgcagctggtgcagtccggggctgagatgaagaagcctgggacctcagtgaaggtctcctgcaggacttctggatacatcttcaccggctcctttatgcactgggtgcgacaggcccctgcacaagggctcgagtggatgggatggatcaaccctaagactggtgccacatactatacagagaaatttaagggcagggtcaccctgaccagggacacgtccatcaacacagcctacatggagatgaccagcctgagatctgacgacacggccgtgtattattgtgcgagaggattttgtgatcttcccgcctgttatcccgtacctcaatacaactggttcgacccctggggccagggaaccctggtcaccgtctcctcagcctccaccaagggcccatcggtcttccccctggcaccctcctccaagagcacctctgggggcacagcggccctgggctgcctggtcaaggactacttccccgaaccggtgacggtgtcgtggaactcaggcgccctgaccagcggcgtgcacaccttcccggctgtcctacagtcctcaggactctactccctcagcagcgtggtgaccgtgccctccagcagcttgggcacccagacctacatctgcaacgtgaatcacaagcccagcaacaccaaggtggacaagagagtt

SEQ ID NO: 2424 - DNA, 657 bp, Artificial Sequence
  Synthetic polynucleotide encoding artificial human antibody VH chain
cccgtgcagctgcaggagtcgggcccaggacttgtgaagccttcacagaccctgtccctcacctgcactgtctctggtggctccatcagcagtggtacttactactggagctggatccggcagcccgccgggaagggactggagtggattgggcgtatctatgccagtgggagcaccaactacaacccctccctcaagagtcgagtcaccatatcagtagacacgtccaagaaccagttctccctgaagctgacctctgtgaccgccgcagacacggccgtgtattactgtgcgcgatatagtgggagctaccctttgggctttgactactggggccagggaaccctggtcaccgtctcctcagcctccaccaagggcccatcggtcttccccctggcaccctcctccaagagcacctctgggggcacagcggccctgggctgcctggtcaaggactacttccccgaaccggtgacggtgtcgtggaactcaggcgccctgaccagcggcgtgcacaccttcccggctgtcctacagtcctcaggactctactccctcagcagcgtggtgaccgtgccctccagcagcttgggcacccagacctacatctgcaacgtgaatcacaagcccagcaacaccaaggtggacaagaaggtg

SEQ ID NO: 2425 - DNA, 650 bp, Artificial Sequence
  Synthetic polynucleotide encoding artificial human antibody VH chain
gcggtgccgaggtgcagctggtgcagtctggagcagaggtgaaaaagccggggcagtctctgaagatctcctgtaagggttctggatacagctttaccaactactggatcggctgggtgcgccagatgcccgggaaaggcctggagtggatggggatcatctatcctggtgactctgataccagatacagcccgtccttccaaggccaggtcaccatctcagccgacaagtccatcagcaccgcctacctgcagtggagcagcctgaaggcctcggacaccgccatgtattactgtgcgagacatgaaggtgcttttgatatctggggccaagggacaatggtcaccgtctcttcagcctccaccaagggcccatcggtcttccccctggcaccctcctccaagagcacctctgggggcacagcggccctgggctgcctggtcaaggactacttccccgaaccggtgacggtgtcgtggaactcaggcgccctgaccagcggcgtgcacaccttcccggctgtcctacagtcctcaggactctactccctcagcagcgtggtgaccgtgccctccagcagcttgggcacccagacctacatctgcaacgtgaatcacaagcccagcaacaccaaggtggacaagaaggtg

SEQ ID NO: 2426 - DNA, 364 bp, Artificial Sequence
  Synthetic polynucleotide encoding artificial human antibody VH chain
gtggtgcagctggtggagtctgggggaggcttggtaaagcctggggggtcccttagactctcctgtgcagcctctggattcactttcagtaacgcctggatgagctgggtccgccaggctccagggaaggggctggagtgggttggccgtattaaaagcaaaactgatggtgggacaacagactacactgcacccgtgaaaggcagattcaccatctcaagagatgattcaaaaaacacgctgtatctgcaaatgaacagcctgaaaaccgaggacacagccgtgtattactgtaccacagatcttgcggtgactacgcgatttgactactggggccagggaaccctggtcaccgtctcctcag

SEQ ID NO: 2427 - DNA, 648 bp, Artificial Sequence
  Synthetic polynucleotide encoding artificial human antibody VH chain
caggtgcagctggtggagtctgggggaggcgtggtccagcctgggaggtccctgagactctcctgtgcagcctctggattccccttcagtacctatgctctgcactgggtccgccaggctccaggcaaggggctggagtgggtggcagtcatatcaaaagatggaaacagcaaatcttccgcagagtccgtgaagggccgattcaccatctccagagacaaatccaggaacacactttatctgcaaatgaacagcctgagacctgaagacacggctgtatattactgtgcgagaagcacacgtacagacgctttggacgtctggggccaagggaccacggtcaccgtctcctcagcctccaccaagggcccatcggtcttccccctggcaccctcctccaagagcacctctgggggcacagcggccctgggctgcctggtcaaggactacttccccgaaccggtgacggtgtcgtggaactcaggcgccctgaccagcggcgtgcacaccttcccggctgtcctacagtcctcaggactctactccctcagcagcgtggtgaccgtgccctccagcagcttgggcacccagacctacatctgcaacgtgaatcacaagcccagcaacaccaaggtggacaagagagtg

SEQ ID NO: 2428 - DNA, 660 bp, Artificial Sequence
  Synthetic polynucleotide encoding artificial human antibody VH chain
gaggtgcagctggtggagtccgggggaggcttggtccagcctggggggtccttgaaactctcctgtgcagcctctggtttctccttcagtggctcttctgtgcactgggtccgccaggcttccgggaaagggctggagtgggttggccgtattagaagcaaaactaagaattacgcgacagcatatgctgcgtcggtgaaaggcaggttcaccatctccagagatgattcaaagaacacggcgtttctgcaaatgcgcagcctgaaagccgaggacacggccgtatattactgtgctaaaaatgacgagatggactttaagggctatgactactggggccagggaaccctggtcaccgtctcctcagcctccaccaagggcccatcggtcttccccctggcaccctcctccaagagcacctctgggggcacagcggccctgggctgcctggtcaaggactacttccccgaaccggtgacggtgtcgtggaactcaggcgccctgaccagcggcgtgcacaccttcccggctgtcctacagtcctcaggactctactccctcagcagcgtggtgaccgtgccctccagcagcttgggcacccagacctacatctgcaacgtgaatcacaagcccagcaacaccaaggtggacaagaaggtg

SEQ ID NO: 2429 - DNA, 641 bp, Artificial Sequence
  Synthetic polynucleotide encoding artificial human antibody VH chain
cccaggtgcagctgcaggagtcgggcccaggactggtgaagccttcggagaccctgtccctcacctgcactgtctctggtggctccatcagtagttattactggagctggatccggcagcccgccgggaagggactggagtggattgggcgtatctacaccagtgggagcaccaactacaacccctccctcaagagtcgagtcaccatgtcagtagacacgtccaagaaccagttctcgctgaagatgagctctgtgaccgccgcggacacggccgtgtattactgtgcgagaggggagttattattcgaccactggggccagggaacgctggtcaccgtctcctcagcctccaccaagggcccatcggtcttccccctggcaccctcctccaagagcacctctgggggcacagcggccctgggctgcctggtcaaggactacttccccgaaccggtgacggtgtcgtggaactcaggcgccctgaccagcggcgtgcacaccttcccggctgtcctacagtcctcaggactctactccctcagcagcgtggtgaccgtgccctccagcagcttgggcacccagacctacatctgcaacgtgaatcacaagcccagcaacaccaaggtggacaagaatgtg

SEQ ID NO: 2430 - DNA, 651 bp, Artificial Sequence
  Synthetic polynucleotide encoding artificial human antibody VH chain
gaggtgcagctggtggagtctgggggaggcttggtgcagccagggcggtccctgagactctcctgtgtagcttctggattcacctttggtgattatgctgtgaactggttccgccaggctccagggaagggcctggaatgggttggtttcattagtaccaaaggttatgatgagacagcagaatatgccgcgtctgtgaagggcagatttaccatgtcaagagatgactccaaaaacatcgcctatctgctgatggacagcctgaaagccgaggacacagccatgtattattgtgctagagaatctacggtggttcttgacttctggggccaggggaccctggtcgccgtctcctcagcctccaccaagggcccatcggtcttccccctggcaccctcctccaagagcacctctgggggcacagcggccctgggctgcctggtcaaggactacttccccgaaccggtgacggtgtcgtggaactcaggcgccctgaccagcggcgtgcacaccttcccggctgtcctacagtcctcaggactctactccctcagcagcgtggtgaccgtgccctccagcagcttgggcacccagacctacatctgcaacgtgaatcacaagcccagcaacaccaaggtggacaagaaagtg

SEQ ID NO: 2431 - DNA, 651 bp, Artificial Sequence
  Synthetic polynucleotide encoding artificial human antibody VH chain
caggtgcagctggtggactctgggggaggcgtggtccagccgggggggtccctgagactctcctgtgcagcgtcgggattcaccctcagtaactatggcatgaactgggtccgccaggctccaggcaaggggctggagtgggtggcatttataccgtatgatggaagtaataaatactacgcagactccgtgaagggccgattcaccatctccagagacatttccaagaacacactgtatctgcaaatgaacagcctgagaactgaggacacggctgtgtattactgtgcgaaaaggtcaacagcagtgggggacttcgacccctggggccagggaaccctggtcaccgtctcctcagcctccaccaagggcccatcggtcttccccctggcaccctcctccaagagcacctctgggggcacagcggccctgggctgcctggtcaaggactacttccccgaaccggtgacggtgtcgtggaactcaggcgccctgaccagcggcgtgcacaccttcccggctgtcctacagtcctcaggactctactccctcagcagcgtggtgaccgtgccctccagcagcttgggcacccagacctacatctgcaacgtgaatcacaagcccagcaacaccaaggtggacaagaaggtg

SEQ ID NO: 2432 - DNA, 675 bp, Artificial Sequence
  Synthetic polynucleotide encoding artificial human antibody VH chain
gaggtgcagctggtggagtctgggggaggcttggtacagccgggggggtccctgagactctcctgtgcagcctctggattcagcatcactacccatagcatgaactgggtccgccaggctccagggaaggggctgcagtgggttgcatacatcagtactagtacaagtaccatatactacgcagactctgtggagggccgattcaccatctcgagagacaaggccaagaacgcactgtatctacaaatggacagcctgagagcccaggacacggctgtatattactgtgcgcgggggccgtccaactggaacgggggtccggagcacatggacgtctggggcaaagggaccacggtcaccgtctcctcagcatccccgaccagccccaaggtcttcccgctgagcctcgacagcaccccccaagatgggaacgtggtcgtcgcatgcctggtccagggcttcttcccccaggagccactcagtgtgacctggagcgaaagcggacagaacgtgaccgccagaaacttcccacctagccaggatgcctccggggacctgtacaccacgagcagccagctgaccctgccggccacacagtgcccagacggcaagtccgtgacatgccacgtgaagcactacacgaatcccagccaggatgtgactgtgccctgccca

SEQ ID NO: 2433 - DNA, 633 bp, Artificial Sequence
  Synthetic polynucleotide encoding artificial human antibody VH chain
gtggtgcagctggtggagtctgggggaggcttggtacagcctggagggtccctgagactctcctgtgcagcctctggattcaccttcagtagttatgagatgaactgggtccgccaggctccagggaaggggctggagtgggtttcatacattagtagtagtggtagtaccatatactacgcagactctgtgaagggccgattcaccatctccagagacaacgccaagaactcactgtatctgcaaatgaacagcctgagagccgaggacacggctgtttattactgtgcgagagattttgactactggggccagggaaccctggtcaccgtctcctcagcctccaccaagggcccatcggtcttccccctggcaccctcctccaagagcacctctgggggcacagcggccctgggctgcctggtcaaggactacttccccgaaccggtgacggtgtcgtggaactcaggcgccctgaccagcggcgtgcacaccttcccggctgtcctacagtcctcaggactctactccctcagcagcgtggtgaccgtgccctccagcagcttgggcacccagacctacatctgcaacgtgaatcacaagcccagcaacaccaaggtggacaagaatgtg

SEQ ID NO: 2434 - DNA, 657 bp, Artificial Sequence
  Synthetic polynucleotide encoding artificial human antibody VH chain
gtggtgcagctggtggagtctgggggaggcttggtacagcctggggggtccctgagactctcctgtgcagcctctggattcaccttcagtagctatagcatgaactgggtccgccaggctccagggaaggggctggagtgggtttcatacattagtagtagtagtagtaccatatactacgcagactctgtgaagggccgattcaccatctccagagacaatgccaagaactcactgtatctgcaaatgaacagcctgagagacgaggacacggctgtgtattactgtgcgagagatccctatggttcggggacggtctggttcgacccctggggccagggaaccctggtcaccgtctcctcagcctccaccaagggcccatcggtcttccccctggcaccctcctccaagagcacctctgggggcacagcggccctgggctgcctggtcaaggactacttccccgaaccggtgacggtgtcgtggaactcaggcgccctgaccagcggcgtgcacaccttcccggctgtcctacagtcctcaggactctactccctcagcagcgtggtgaccgtgccctccagcagcttgggcacccagacctacatctgcaacgtgaatcacaagcccagcaacaccaaggtggacaagaatgtg

SEQ ID NO: 2435 - DNA, 672 bp, Artificial Sequence
  Synthetic polynucleotide encoding artificial human antibody VH chain
gaggcacagttggtggagtctggaggaggcttgatccagccgggggggtccctgagactctcctgtgcagcctctgggttcagcgtcagtagcaagtacatgagctgggtccgccaggctccagggaaggggctggagtgggtctcagttatgtacagtggtggcgccacatactacgcagattccgtgaagggccgattcgtcatctccagagacagttccaagaacacggtatttcttcaaatgaacagcctgagagccgaggacacggccgtttattactgtgcgaaaactgagtacacttttttgagtggctccgactactaccagtacggtatggacgtctggggccaagggacaacggtcaccgtctcctcagcctccaccaagggcccatcggtcttccccctggcaccctcctccaagagcacctctgggggcacagcggccctgggctgcctggtcaaggactacttccccgaaccggtgacggtgtcgtggaactcaggcgccctgaccagcggcgtgcacaccttcccggctgtcctacagtcctcaggactctactccctcagcagcgtggtgaccgtgccctccagcagcttgggcacccagacctacatctgcaacgtgaatcacaagcccagcaacaccaaggtggacaagagagtg

SEQ ID NO: 2436 - DNA, 663 bp, Artificial Sequence
  Synthetic polynucleotide encoding artificial human antibody VH chain
ccggtgcagctggtgcagtctggagcagaggtgaaaaagccgggggagtctctgaagatctcctgtaagggttctggatacagctttaccaactactggatcggctgggtgcgccagatgcccgggaaaggcctggagtggatggggatcatctatcctggtgactctgataccagatacagcccgtccttccaaggccaggtcaccatctcagccgacaagtccatcagcaccgcctaccttcagtggagcagcctgaaggcctcggacaccgccatgtattactgtgcgagacgggggttattgcgtgggagcaacgagggaaggtttgactactggggccagggaaccctggtcaccgtctcctcagcctccaccaagggcccatcggtcttccccctggcaccctcctccaagagcacctctgggggcacagcagccctgggctgcctggtcaaggactacttccccgaaccggtgacggtgtcgtggaactcaggcgccctgaccagcggcgtgcacaccttcccggctgtcctacagtcctcaggactctactccctcagcagcgtggtgaccgtgccctccagcagcttgggcacccagacctacatctgcaacgtgaatcacaagcccagcaacaccaaggtggacaagaaggtg

SEQ ID NO: 2437 - DNA, 666 bp, Artificial Sequence
  Synthetic polynucleotide encoding artificial human antibody VH chain
gtggtgcagctggtggagtccgggggagacttggtccagcctggggggtccctgaaactctcctgtgcagcctctgggttcaccttcagtggctctgctatgcactgggtccgccaggcttccgggaaagggctggagtgggttggccgtattagaagtaaacctaacagttacgcgacagcatatgctgtgtcggtgaaaggcaggttcaccatctccagagatgattcaaagaacacggcgtatctgcaaatgaacagcctgaaaaccgaggacacggccgtatattattgtactagacgcggcagtgcctggacggacccctactacacggacgtctggggcaaagggaccacggtcaccgtctcctcagcctccaccaagggcccatcggtcttccccctggcaccctcctccaagagcacctctgggggcacagcggccctgggctgcctggtcaaggactacttccccgaaccggtgacggtgtcgtggaactcaggcgccctgaccagcggcgtgcacaccttcccggctgtcctacagtcctcaggactctactccctcagcagcgtggtgaccgtgccctccagcagcttgggcacccagacctacatctgcaacgtgaatcacaagcccagcaacaccaaggtggacaagagagag

SEQ ID NO: 2438 - DNA, 666 bp, Artificial Sequence
  Synthetic polynucleotide encoding artificial human antibody VH chain
tcggtgcagctggtggagtctgggggaggcgtggtccagcctgggaggtccctgagactctcctgtgcagcgtctggattcaccttcagtgactatggcatgcactgggtccgccaggctccaggcaaggggctggagtgggtggcagttatatggtatgatggaagtaatgagtactatgcagactccgtgaagggccgattcaccatctccagagacaattccaagaacacggtttatctgcaaatgaacagcctaggagccgaggacacggctgtatattactgtgcgagagatgatgtccctaggggttatgactactggggccagggaaccctggtcaccgtctcctcagggagtgcatccgccccaacccttttccccctcgtctcctgtgagaattccccgtcggatacgagcagcgtggccgttggctgcctcgcacaggacttccttcccgactccatcactttctcctggaaatacaagaacaactctgacatcagcagcacccggggcttcccatcagtcctgagagggggcaagtacgcagccacctcacaggtgctgctgccttccaaggacgtcatgcagggcacagacgaacacgtggtgtgcaaagtccagcaccccaacggcaacaaagaaaagaacgtgcctcttcca

SEQ ID NO: 2439 - DNA, 654 bp, Artificial Sequence
  Synthetic polynucleotide encoding artificial human antibody VH chain
tcagtgcagctggtggagtctgggggaggcgtggtccagcctgggaggtccctgagactctcctgtgcagcgtctggatacaccttcaataactatggcatgcactgggtccgccaggctccaggcaaggggctggagtgggtggcaattatatggtatgatggaagtaataaatactatgcagactccgtgaagggccgattcaccatctccagagacaattccaagaacacgctgtatctgcaaatgaacagcctgagagccgaggacacggctgtgtattactgtgcgagagagtacattgtacccttctacggtatggacgtctggggccaagggaccacggtcaccgtctcctcagcctccaccaagggcccatcggtcttccccctggcaccctcctccaagagcacctctgggggcacagcggccctgggctgcctggtcaaggactacttccccgaaccggtgacggtgtcgtggaactcaggcgccctgaccagcggcgtgcacaccttcccggctgtcctacagtcctcaggactctactccctcagcagcgtggtgaccgtgccctccagcagcttgggcacccagacctacatctgcaacgtgaatcacaagcccagcaacaccaaggtggacaagaaggtg

SEQ ID NO: 2440 - DNA, 644 bp, Artificial Sequence
  Synthetic polynucleotide encoding artificial human antibody VL chain
gcgacatccagatgacccagtctccatcttccctgtctgcatctgtgggagacagagtcagcatcacttgtcgggcgagtcagggtgttagcagctacttagcctggtatcaaaagaaaccagggagagcccctaaactcctgatctatagtgcatccagtttgcaaagtggggtcccatcaaggttcagcggcagtggatctgggacagatttcactctcaccatcaccggcctgcagcctgaagattttgcaacttacttttgtcaacagactaacactttccccctcactttcggcggagggaccaaggtggagatcaaacgaactgtggctgcaccatctgtcttcatcttcccgccatctgatgagcagttgaaatctggaactgcctctgttgtgtgcctgctgaataacttctatcccagagaggccaaagtacagtggaaggtggataacgccctccaatcgggtaactcccaggagagtgtcacagagcaggacagcaaggacagcacctacagcctcagcagcaccctgacgctgagcaaagcagactacgagaaacacaaactctacgcctgcgaagtcacccatcagggcctgagctcgcccgtcacaaagagcttcaacaggggagagtgt

SEQ ID NO: 2441 - DNA, 644 bp, Artificial Sequence
  Synthetic polynucleotide encoding artificial human antibody VL chain
gtgacatccagatgacccagtctccatcctccctgtctgcatctgttggagacagagtcaccatcacttgccgggcaagtcagagcattggcagctatttaaattggtatcagcagaaaccagggaaagcccctaagctcctgatctatgctgcatccagtttgcaaagtggggtcccatcaaggttcagtggcagtggatctgggacagatttcactctcaccatcagcagtctgcaacctgaagattttgcaacttactactgtcaacagagttacagtacccctccgcgttttggccaggggaccaagctggagatcaaacgaactgtggctgcaccatctgtcttcatcttcccgccatctgatgagcagttgaaatctggaactgcctctgttgtgtgcctgctgaataacttctatcccagagaggccaaagtacagtggaaggtggataacgccctccaatcgggtaactcccaggagagtgtcacagagcaggacagcaaggacagcacctacagcctcagcagcaccctgacgctgagcaaagcagactacgagaaacacaaagtctacgcctgcgaagtcacccatcagggcctgagctcgcccgtcacaaagagcttcaacaggggagagtgt

SEQ ID NO: 2442 - DNA, 644 bp, Artificial Sequence
  Synthetic polynucleotide encoding artificial human antibody VL chain
gcgacatccagatgacccagtctccatcttacgtgtctgcatctgtaggagacagagtcaccatcacttgtcgggcgagtcagggtattgacgtctggttggcctggtatcagcagaaaccagggaaagcccctaagctcctgatctatactgcatccagtttacaaagtggggtcccatcaaggtttagcggcagtggaggtgggacagaattcactctcaccatcagcagcctgcagcccgaggattttgcaacttactattgtcaacagtctaacagtttccccgggactttcggccctgggaccaaagtggatgtcaaacgaactgtggctgcaccatctgtcttcatcttcccgccatctgatgagcagttgaaatctggaactgcctctgttgtgtgcctgctgaataacttctatcccagagaggccaaagtacagtggaaggtggataacgccctccaatcgggtaactcccaggagagtgtcacagagcaggacagcaaggacagcacctacagcctcagcagcaccctgacgctgagcaaagcagactacgagaaacacaaagtctacgcctgcgaagtcacccatcagggcctgagctcgcccgtcacaaagagcttcaacaggggagagtgt

SEQ ID NO: 2443 - DNA, 331 bp, Artificial Sequence
  Synthetic polynucleotide encoding artificial human antibody VL chain
ccgtctgtgctgactcagccaccctcagcgtctgggacccccgggcagagggtcaccatctcttgttctggaagcagttccaacatcggaagtaattatgtatactggtaccagcagctcccaggaacggcccccaaattcctcatctataggaataatcagcggccctcaggggtccctgaccgattctctggctccaagtctggcacctcagcctccctggccatcagtgggctccggtccgaggatgaggctgattattactgtgcagcatgggaggacagcctgagtggtccggtgttcggcggagggaccaagctgaccgtcctag

SEQ ID NO: 2444 - DNA, 636 bp, Artificial Sequence
  Synthetic polynucleotide encoding artificial human antibody VL chain
tcttctgagctgactcaggaccctgctgtgtctgtggccttgggacagacagtcaggatcacatgccaaggagacagcctcagaaactattatgcaagttggttccagcagaagccaggacaggcccctgtacttgtcatctttggtaaaaactaccggccctccgggatcccagaccgattctctggctccaactcaggaaacacagcttccctgaccatcactggggctcaggcggaagatgaggccgactactactgtaactcccgggacaggagtggttatgtcttcggatccgggaccaaggtcaccgtcctaggtcagcccaaggccaaccccactgtcactctgttcccgccctcctctgaggagctccaagccaacaaggccacactagtgtgtctgatcagtgacttctacccgggagctgtgacagtggcctggaaggcagatggcagccccgtcaaggcgggagtggagaccaccaaaccctccaaacagagcaacaacaagtacgcggccagcagctacctgagcctgacgcccgagcagtggaagtcccacagaagctacagctgccaggtcacgcatgaagggagcaccgtggagaagacagtggcccctacagaatgttca

SEQ ID NO: 2445 - DNA, 642 bp, Artificial Sequence
  Synthetic polynucleotide encoding artificial human antibody VL chain
ctctatgtgctgactcagccaccctcagtgtcagtggccccaggaacgacggcctggatttcctgtgggggaaacaacattggaattaaaagtgtccactggtaccagcagaagccaggccaggcccctctgttggtcatctcttatgatagcgaccggccctcagtgatccctgagcgattctctgtctccaactctgggaacacggtcaccctgaccatcagcagggtcgaagccggggatgaagccgactattactgtcaggtgtgggataatggtcattctcattgggtgttcggcggagggaccaagctgaccgtcctaggtcagcccaaggctgccccctcggtcactctgttcccgccctcctctgaggagcttcaagccaacaaggccacactggtgtgtctcataagtgacttctacccgggagccgtgacagtggcctggaaggcagatagcagccccgtcaaggcgggagtggagaccaccacaccctccaaacaaagcaacaacaagtacgcggccagcagctacctgagcctgacgcctgagcagtggaagtcccacagaagctacagctgccaggtcacgcatgaagggagcaccgtggagaagacagtggcccctacagaatgttca

SEQ ID NO: 2446 - DNA, 319 bp, Artificial Sequence
  Synthetic polynucleotide encoding artificial human antibody VL chain
gacatccagatgacccagtctccatcctccctgtctgcatctgtaggagacagagtcaccatcacttgccgggcaagtcagagcataagcagttatttaaattggtatcagcaaaaacccgggagagcccctaggctcctgatctatgctgcatccaggttgcaaattggggtcccatcaaggttcagtggcagtggatctgggacagatttcactctcaccatcagcagtctgcagcctgaagattttgcaacttactactgtcaacagagttacagaatgccttgcagttttggccaggggaccaagctggagatca

SEQ ID NO: 2447 - DNA, 650 bp, Artificial Sequence
  Synthetic polynucleotide encoding artificial human antibody VL chain
gagaaattgtgttgacgcagtctccaggcaccctgtctttgtctccaggggaaagagccaccctctcctgcagggccagtcagagtgttagcagcagctacttagcctggtaccagcagaaacctggccaggctcccaggctcctcatctatgatgcatccagcagggccactggcatcccagacaggttcagtggcagtgggtctgggacagacttcactctcaccatcagcagactggagcctgaagattttgcagtgtattactgtcagcagtatggtagctcacctcccatcaccttcggccaagggacacgactggagattaaacgaactgtggctgcaccatctgtcttcatcttcccgccatctgatgagcagttgaaatctggaactgcctctgttgtgtgcctgctgaataacttctatcccagagaggccaaagtacagtggaaggtggataacgccctccaatcgggtaactcccaggagagtgtcacagagcaggacagcaaggacagcacctacagcctcagcagcaccctgacgctgagcaaagcagactacgagaaacacaaactctacgcctgcgaagtcacccatcagggcctgagctcgcccgtcacaaagagcttcaacaggggagagtgt

SEQ ID NO: 2448 - DNA, 331 bp, Artificial Sequence
  Synthetic polynucleotide encoding artificial human antibody VL chain
cattttatgctgactcagccccactctgtgtcggagtctccggggaagacggtaaccatctcctgcacccgcagcagtggcaacattgccagctactatgtgcagtggtatcagcagcgcccgggcagtgcccccaccactgtgatctatgaggatgaccaaagaccttctggggtccctgatcggttctctgcctccatcgacagctcctccaactctgcctccctcaccatctctggactgaagactgaggacgaggctgactattattgtcagtcttatgatacaaccaatgtgatattcggcggagggaccaagctgaccgtgctcg

SEQ ID NO: 2449 - DNA, 645 bp, Artificial Sequence
  Synthetic polynucleotide encoding artificial human antibody VL chain
gaaattgttttgacgcagtctccaggcaccctgtctttgtctccaggggaaagagccaccctctcctgcagggccagtcagagtgttagcagcagttacttagcctggtatcagcagaaacctggccaggctcccaggctcctcatctttggtgcatccaccagggcctctggcatcccagacaggttcagtggccgtgggtctgggacagagttcactctcaccatcagcagactggagcctgaagattttgcagtgtattactgtcaacagtatgatagttcacccttcactttcggccctgggaccaaggtggagatcaaacgaactgtggctgcaccatctgtcttcatcttcccgccatctgatgagcagttgaaatctggaactgcctctgttgtgtgcctgctgaataacttctatcccagagaggccaaagtacagtggaaggtggataacgccctccaatcgggtaactcccaggagagtgtcacagagcaggacagcaaggacagcacctacagcctcagcagcaccctgacgctgagcaaagcagactacgagaaacacaaactctacgcctgcgaagtcacccatcagggcctgagctcgcccgtcacaaagagcttcaacaggggagagtgt

SEQ ID NO: 2450 - DNA, 645 bp, Artificial Sequence
  Synthetic polynucleotide encoding artificial human antibody VL chain
ccgtctgtgttgacgcagccgccctcagtgtctgcggccccaggacagaacgtcaccatttcctgctctggaagtagctccaatattgagaataatgatgtatcctggtaccagcagctcccaggaacagcccccaaagtcatcatctatgaaaataatcagcgaccctcagggattcctgaccgattctctggctccaagtctggcacgtcagccaccctgggcatcaccggactccagactggggacgaggccgattattactgcggaacatgggatgacaacctgagtgctgtattcggcggagggaccaaactgaccgtcctaggtcagcccaaggctgccccctcggtcactctgttcccgccctcctctgaggagcttcaagccaacaaggccacactggtctgtctcataagtgacttctacccgggagccgtgacagtggcctggaaggcagatagcagccccgtcaaggcgggagtggagaccaccacaccctccaaacaaagcaacaacaagtacgcggccagcagctatctgagcctgacgcctgagcagtggaagtcccacagaagctacagctgccaggtcacgcatgaagggagcaccgtggagaagacagtggcccctacagaatgttca

SEQ ID NO: 2451 - DNA, 337 bp, Artificial Sequence
  Synthetic polynucleotide encoding artificial human antibody VL chain
gatgttgtgatgactcagtctccactctccctgcccgtcacccttggacagccggcctccatctcctgcaggtctagtcaaagcctcgtacacagtgatggaaacacctacttgaattggtttcaacagaggccaggccaatctccaaggcgcctaatttatatggtttctaaccgggactctggggtcccagacagattcagcggcagtgggtcaggcactgatttcacactgaaaatcagcagggtggaggctgaggatgttggggtttattactgcctgcaaggtacacactggcctccgacgatcggccaggggaccaaggtggaaatcgaac

SEQ ID NO: 2452 - DNA, 648 bp, Artificial Sequence
  Synthetic polynucleotide encoding artificial human antibody VL chain
ccgtctggactgactcagccaccctcggcgtctgggacccccgggcagagggtcaccatgtcttgctctggaagcagctccaatatcgggagaaattatgtttactggtaccaacaactcccaggagcggcccccaaactcctcatctatagggataatcagcggccctcaggggtccctgatcgattctctggctccaagtctggcacctcagcctccctggccatcagtgggctccggtccgaggatgaggctgattattactgtgcagcatgggatgacaatgtgagtggtcctggcttcggagctgggaccaggctcaccgtcctaggtcagcccaaggccaaccccactgtcactctgttcccgccctcctctgaggagctccaagccaacaaggccacactagtgtgtctgatcagtgacttctacccgggagctgtgacagtggcctggaaggcagatggcagccccgtcaaggcgggagtggagaccaccaaaccctccaaacagagcaacaacaagtacgcggccagcagctacctgagcctgacgcccgagcagtggaagtcccacagaagctacagctgccaggtcacgcatgaagggagcaccgtggagaagacagtggcccctacagaatgttca

SEQ ID NO: 2453 - DNA, 648 bp, Artificial Sequence
  Synthetic polynucleotide encoding artificial human antibody VL chain
cccgctgtgctgactcagtcaccctcagcgtctgggacccccgggcagagggtcaccatctcttgttttgggagcatctccaacatcggaagtaatcctgtaaactggtaccagcaggtcccaggagcggcccccaaactcctcatctatagtagtagtcagcggccctcaggggtccctgaccgattctctggctccaagtctggcacctcagcctccctggccatcagtggcctccagtctgaggatgaggctgactattactgtgcaacatgggatgacagcctgaatggtccggtgttcggcggagggaccaagcttaccgtccttggtcagcccaaggctgccccctcggtcactctgttcccgccctcctctgaggagcttcaagccaacaaggccacactggtgtgtctcataagtgacttctacccgggagccgtgacagtggcctggaaggcagatagcagccccgtcaaggcgggagtggagaccaccacaccctccaaacaaagcaacaacaagtacgcggccagcagctacctgagcctgacgcctgagcagtggaagtcccacagaagctacagctgccaggtcacgcatgaagggagcaccgtggagaagacagtggcccctacagaatgttca

SEQ ID NO: 2454 - DNA, 639 bp, Artificial Sequence
  Synthetic polynucleotide encoding artificial human antibody VL chain
gaaacagtgatgacgcagtctccagccaccctgtctgtgtctccgggggatagagccaccctctcctgcagggccagtcagaatgttaacttcaacttagcctggtaccagcagaaacctggccaggctcccaggctcctcatctatgatgcatccaccagggccactggtatccctgccaggttcagtggcagtgcgtctgggacagagttcacgctcaccatcaacagcctgcagtctgaagattttgcagtttactactgtcagcagtataataactggtggacgttcggccaagggaccaaactggagatcaaacgaactgtggctgcaccatctgtcttcatcttcccgccatctgatgagcagttgaaatctggaactgcctctgttgtgtgcctgctgaataacttctatcccagagaggccaaagtacagtggaaggtggataacgccctccaatcgggtaactcccaggagagtgtcacagagcaggacagcaaggacagcacctacagcctcagcagcaccctgacgctgagcaaagcagactacgagaaacacaaagtctacgcctgcgaagtcacccatcagggcctgagctcgcccgtcacaaagagcttcaacaggggagagtgg

SEQ ID NO: 2455 - DNA, 647 bp, Artificial Sequence
  Synthetic polynucleotide encoding artificial human antibody VL chain
cagaaattgtgttgacgcagtctccaggcaccctgtctttgtctccaggggaaagagccaccctctcctgcagggccagtcagagtgttagcagcagctccttagcctggtaccagcagaaacctggccaggctcccaggctcctcatctatggtgcatccagcagggccactggcatcccagacaggttcagtggcagtgggtctgggacagacttcactctcaccatcagcagactggagcctgaagattttgcagtgtattactgtcagcaatatggtagttttcggtacacttttggccaggggaccaagctggagatcaaacgaactgtggctgcaccatctgtcttcatcttcccgccatctgatgagcagttgaaatctggaactgcctctgttgtgtgcctgctgaataacttctatcccagagaggccaaagtacagtggaaggtggataacgccctccaatcgggtaactcccaggagagtgtcacagagcaggacagcaaggacagcacctacagcctcagcagcaccctgacgctgagcaaagcagactacgagaaacacaaagtctacgcctgcgaagtcacccatcagggcctgagctcgcccgtcacaaagagcttcaacaggggagagtgg

SEQ ID NO: 2456 - DNA, 639 bp, Artificial Sequence
  Synthetic polynucleotide encoding artificial human antibody VL chain
ccctatgagctgacacagccaccctcggtgtcagtgtccccaggacagacggccaggatcacctgctctggagatgctttgccaaagcaatatgcttattggtaccagcagaagccaggccaggcccctgtgctggtgatatataaagacagtgagaggccctcagggatccctgagcgattctctggctccagctcagggacaacagtcacgttgaccatcagtggagtccaggcagaagacgaggctgactattactgtcaatcagcagacagcagtgatacttatgtgttcggcggagggaccaagttgaccgtcctaggtcagcccaaggctgccccctcggtcactctgttcccgccctcctctgaggagcttcaagccaacaaggccacactggtgtgtctcataagtgacttctacccgggagccgtgacagtggcctggaaggcagatagcagccccgtcaaggcgggagtggagaccaccacaccctccaaacaaagcaacaacaagtacgcggccagcagctatctgagcctgacgcctgagcagtggaagtcccacagaagctacagctgccaggtcacgcatgaagggagcaccgtggagaagacagtggcccctacagaatgttca

SEQ ID NO: 2457 - DNA, 644 bp, Artificial Sequence
  Synthetic polynucleotide encoding artificial human antibody VL chain
cagaaattgtgttgacacagtctccagccaccctgtctttgtctccaggggaaagagccaccctctcctgcagggccagtcagagtgttagcagctacttagcctggtaccaacagaaacctggccaggctcccaggctcctcatctatgatgcatccaacagggccactggcatcccagccaggttcagtggcagtgggtctgggacagacttcactctcaccatcagcagcctagagcctgaagattttgcagtttattactgtcagcagcgtagcaactggcctctcactttcggcggagggaccaaggtggagatcaaacgaactgtggctgcaccatctgtcttcatcttcccgccatctgatgagcagttgaaatctggaactgcctctgttgtgtgcctgctgaataacttctatcccagagaggccaaagtacagtggaaggtggataacgccctccaatcgggtaactcccaggagagtgtcacagagcaggacagcaaggacagcacctacagcctcagcagcaccctgacgctgagcaaagcagactacgagaaacacaaagtctacgcctgcgaagtcacccatcagggcctgagctcgcccgtcacaaagagcttcaacaggggagagtgg

SEQ ID NO: 2458 - DNA, 647 bp, Artificial Sequence
  Synthetic polynucleotide encoding artificial human antibody VL chain
gagaaattgtgttgacacagtcgccagccaccctgtctttgtctccaggggaaagagccaccctctcctgcagggccagtcagagtgttggcagctacttagcctggtaccaacagaaacctggccaggctcccaggctcctcatctatgatgcatccaacagggccactggcatcccagccaggttcagtggcagtgggtctgggacagacttcactctcaccatcagcagcctagagcctgaagattttgcagtttattactgtcagcagggtagcaactggttggcgctcactttcggcggagggaccaaggtggagatcaaacgaactgtggctgcaccatctgtcttcatcttcccgccatctgatgagcagttgaaatctggaactgcctctgttgtgtgcctgctgaataacttctatcccagagaggccaaagtacagtggaaggtggataacgccctccaatcgggtaactcccaggagagtgtcacagagcaggacagcaaggacagcacctacagcctcagcagcaccctgacgctgagcaaagcagactacgagaaacacaaagtctacgcctgcgaagtcacccatcagggcctgagctcgcccgtcacaaagagcttcaacaggggagagtgt

SEQ ID NO: 2459 - DNA, 639 bp, Artificial Sequence
  Synthetic polynucleotide encoding artificial human antibody VL chain
atccagatgacccagtctccatcctccctgtctgcatctgtaggagacagagtcaccatcacttgccgggcgagtcaggccattgccaactctttagcctggtatcagcagagaccagggaaagcccctaagctcctgatctatgctgcatccagtttggaaagtggggtcccatccaggttcagcggcagtggatctgggacggattacactctcaccatcagcagcctgcagcctgaagactttgcaacctattactgtcaacagtattatattaaccctcggacgttcggccaagggaccaaggtggaaatcaaacgaactgtggctgcaccatctgtcttcatcttcccgccatctgatgagcagttgaaatctggaactgcctctgttgtgtgcctgctgaataacttctatcccagagaggccaaagtacagtggaaggtggataacgccctccaatcgggtaactcccaggagagtgtcacagagcaggacagcaaggacagcacctacagcctcagcagcaccctgacgctgagcaaagcagactacgagaaacacaaagtctacgcctgcgaagtcacccatcagggcctgagctcgcccgtcacaaagagcttcaacaggggagagtgt

SEQ ID NO: 2460 - DNA, 660 bp, Artificial Sequence
  Synthetic polynucleotide encoding artificial human antibody VL chain
ggcatcgtgatgacccagtctccagactccctggctgtgtctctgggcgagagggccaccatcaactgcaagtccagccagagtgttttatacagctccaacaatgagaactacttagcttggtaccagcagaaaccaggacagcctcctaagctgctcatttactgggcatctacccgggaatccggggtccctgaccgattcagtggcagcgggtctgggacagatttcactctcaccatcagcagcctgcaggctgaagatgtggcagtttattactgtcagcaatattatagtactccgtacacttttggccaggggaccaagctggagatcaaacgaactgtggctgcaccatctgtcttcatcttcccgccatctgatgagcagttgaaatctggaactgcctctgttgtgtgcctgctgaataacttctatcccagagaggccaaagtacagtggaaggtggataacgccctccaatcgggtaactcccaggagagtgtcacagagcaggacagcaaggacagcacctacagcctcagcagcaccctgacgctgagcaaagcagactacgagaaacacaaagtctacgcctgcgaagtcacccatcagggcctgagctcgcccgtcacaaagagcttcaacaggggagagtgg

SEQ ID NO: 2461 - DNA, 320 bp, Artificial Sequence
  Synthetic polynucleotide encoding artificial human antibody VL chain
gacatccagatgacccagtctccatcctccctgtctgcatctgtaggagacagagtcaccatctcttgccgggcaagtcacaacattaacacctatttaaattggtatcaacacaaaccagggaaagcccctaagatcgtgatttatggtgcatccagtttgcaaagtggagtcccatcaaggttcagtggcagtggatctgggacagacttctctctcaccatcagcagtctgcagcgtgaagattttgcaacttacttctgtcaacagagtttcaacaccgtgctcactttcggcggagggaccagggtggatatcaa

SEQ ID NO: 2462 - DNA, 651 bp, Artificial Sequence
  Synthetic polynucleotide encoding artificial human antibody VL chain
cagtctgccctgactcagcctgcctccgtgtctgggtctcctggacagtcgatcaccatctcctgcactggaaccagcagtgacgttggtggttataactatgtctcctggtaccaacagcacccaggcaaagcccccaaactcatgatttatgaggtcagtaatcggccctcaggggtttctaatcgcttctctggctccaagtctggcaacacggcctccctgaccatctctgggctccaggctgaggacgaggctgattatcactgcagctcatatacaatcaccagcacgctttgggtgttcggcggagggaccaagctgaccgtcctaggtcagcccaaggctgccccctcggtcactctgttcccaccctcctctgaggagcttcaagccaacaaggccacactggtgtgtctcataagtgacttctacccgggagccgtgacagtggcctggaaggcagatagcagccccgtcaaggcgggagtggagaccaccacaccctccaaacaaagcaacaacaagtacgcggccagcagctacctgagcctgacgcctgagcagtggaagtcccacaaaagctacagctgccaggtcacgcatgaagggagcaccgtggagaagacagtggcccctacagaatgttca

SEQ ID NO: 2463 - DNA, 648 bp, Artificial Sequence
  Synthetic polynucleotide encoding artificial human antibody VL chain
cagtctgtgctgactcagccaccctcagcgtctgggacccccgggcagggggtcaccatctcttgttctggaaccagcgccaacatcggaaagaattatgtatcttggtaccagcacctcccgggaacggcccccagactcctcatctataggattgatcagcggccctcaggggtccctgaccgattctctggctccaagtctggcacctcagcctccctggccatcagtgggctccggcccgaggatgaggctgattattactgtgcagcatgggatgacagcctgagtggtccggtattcggcggagggaccaagctgaccgtcctaggtcagcccaaggctgccccctcggtcactctgttcccgccctcctctgaggagcttcaagccaacaaggccacactggtgtgtctcataagtgacttctacccgggagccgtgacagtggcctggaaggcagatagcagccccgtcaaggcgggagtggagaccaccacaccctccaaacaaagcaacaacaagtacgcggccagcagctatctgagcctgacgcctgagcagtggaagtcccacagaagctacagctgccaggtcacgcatgaagggagcaccgtggagaagacagtggcccctacagaatgttca

SEQ ID NO: 2464 - DNA, 642 bp, Artificial Sequence
  Synthetic polynucleotide encoding artificial human antibody VL chain
gacctgcagatgacccagtctccatcctccctgtctgcatctataggagacagagtcaccatcacttgccgggcaagtcagagcattagcacttatttcaattggtatcagcagaaaccagggaaagcccctaagctcctgatctatgctgcatccagtttgcaaagtggggtcccatcaaggttcagtggcagtggatctgggacagatttcactctcaccatcaccagtctgcagcctgaagactttgcaacttactactgtcagcagacttacagtaatccttggacgttcggccaagggaccaaggtggacttcaaacgaactgtggctgcaccatctgtcttcatcttcccgccatctgatgagcagttgaaatctggaactgcctctgttgtgtgcctgctgaataacttctatcccagagaggccaaagtacagtggaaggtggataacgccctccaatcgggtaactcccaggagagtgtcacagagcaggacagcaaggacagcacctacagcctcagcagcaccctgacgctgagcaaagcagactacgagaaacacaaagtctacgcctgcgaagtcacccatcagggcctgagctcgcccgtcacaaagagcttcaacaggggagagtgg

SEQ ID NO: 2465 - DNA, 644 bp, Artificial Sequence
  Synthetic polynucleotide encoding artificial human antibody VL chain
gtgacatccagatgacccagtctccgtcctccctgtctgcatctgtaggagatagagttaccatcacttgccgggcaagtcagagcattaagaactatgtaaattggtatcagcagaaaccaggagaagcccctaacctcttgatctttgctgcatccaatttgcaaagtggggtcccatcaaggttcactggcagtggatctgggacagatttctctctcaccatcagcagtctgcaacctgaagactttgcagcttactactgtcaacagacttacagtcaccctcgcacgttcggccaagggaccagggtggaaatcaaacgaactgtggctgcaccatctgtcttcatcttcccgccatctgatgagcagttgaaatctggaactgcctctgttgtgtgcctgctgaataacttctatcccagagaggccaaagtacagtggaaggtggataacgccctccaatcgggtaactcccaggagagtgtcacagagcaggacagcaaggacagcacctacagcctcagcagcaccctgacgctgagcaaagcagactacgagaaacacaaactctacgcctgcgaagtcacccatcagggcctgagctcgcccgtcacaaagagcttcaacaggggagagtgt

SEQ ID NO: 2466 - DNA, 651 bp, Artificial Sequence
  Synthetic polynucleotide encoding artificial human antibody VL chain
caatctgtcctgacgcagccgccctcagtgtctggggccccagggcagagggtcaccatctcctgcactgggagcagctccaacatcggggcaggttatgatgtacactggtaccagcaccttccaggaacagcccccaaactcctcatttatggtgacagccatcggccctcaggggtccctgacggattctctggctccaagtctggcacctcagcctccctggccatcactgggctccaggctgaggatgaggctgattattactgccagtcctatgacagcagcctgagtggttatgtcttcggaactgggaccaaggtcaccgtcctaggtcagcccaaggccaaccccactgtcactctgttcccgccctcctctgaggagcttcaagccaacaaggccacactagtgtgtctgatcagtgacttctacccgggagctgtgacagtggcctggaaggcagatggcagccccgtcaaggcgggagtggagaccaccaaaccctccaaacagagcaacaacaagtacgcggccagcagctacctgagcctgacgcccgagcagtggaagtcccacagaagctacagctgccaggtcacgcatgaagggagcaccgtggagaagacagtggcccctacagaatgttca

SEQ ID NO: 2467 - DNA, 325 bp, Artificial Sequence
  Synthetic polynucleotide encoding artificial human antibody VL chain
tcctatgtgctgactcagccaccctcggtgtcagtggccccaggacagacggccaggattgcctgtgggggaaacaacattggaagtaaaactgtgcactggtaccagcagaagccaggccaggcccctatggtggtcgtctatgatgatagcgaccggccctcagggatccctgagcgattctctggctccaactctgggaacacggccaccctgaccatcagcagggtcgaagccggggatgaggccgactactactgtcaggtgtgggatagtagtagtgatcattatgtcctcggaactgggaccaaggtcaccgtcctag

SEQ ID NO: 2468 - DNA, 644 bp, Artificial Sequence
  Synthetic polynucleotide encoding artificial human antibody VL chain
gcgacatccagatgacccagtctccatcttctgtgtctgcatctgtaggggacagagtcaccatcacttgtcgggcgagtcaggatattagcaactggttagcctggtatctgcagaaaccagggaaagcccctaagctcctgatctatgctgcatccagtttgcaaagtggagtcccatccaggttcagcggcagtggatctgggacagatttcactctcaccatcagcagcctgcagcctgaagattttgcgacttactattgtcaacagactagcagtttccctcgaactttcggccctgggaccaaagtggatatcaaacgaactgtggctgcaccatctgtcttcatcttcccgccatctgatgagcagttgaaatctggaactgcctctgttgtgtgcctgctgaataacttctatcccagagaggccaaagtacagtggaaggtggataacgccctccaatcgggtaactcccaggagagtgtcacagagcaggacagcaaggacagcacctacagcctcagcagcaccctgacgctgagcaaagcagactacgagaaacacaaagtctacgcctgcgaagtcacccatcagggcctgagctcgcccgtcacaaagagcttcaacaggggagagtgt

SEQ ID NO: 2469 - DNA, 639 bp, Artificial Sequence
  Synthetic polynucleotide encoding artificial human antibody VL chain
ccctatgagctgacacagccaccctcggtgtcagtgtccccaggacagacggccaggatcacctgctctggagatgcattgccaaacgaaaatgctttttggtaccagcagaagccaggccaggcccctgtgttggtgatatatgaggacattaagaggccctcagggatccctgagcgattctctggctccagttcagggacaacagtcacattgaccatcagtggggtccaggcagaggacgaggctgactattactgtcaatcagtagacattacttctacttgggtgttcggcggggggaccaagctgaccgtcctaggtcagcccaaggctgccccctcggtcactctgttcccgccctcctctgaggagcttcaagccaacaaggccacactggtgtgtctcataagtgacttctacccgggagccgtgacagtggcctggaaggcagatagcagccccgtcaaggcgggagtggagaccaccacaccctccaaacaaagcaacaacaagtacgcggccagcagctacctgagcctgacgcctgagcagtggaagtcccacaaaagctacagctgccaggtcacgcatgaagggagcaccgtggagaagacagtggcccctacagaatgttca

SEQ ID NO: 2470 - DNA, 651 bp, Artificial Sequence
  Synthetic polynucleotide encoding artificial human antibody VL chain
cagtctgccctgactcagcctccctccgtgtccgggtctcctggacagtcagtcaccatctcctgcactggaaccaccagtgacattggtagttatgaccgtgtctcctggtaccagaagcccccaggcacagcccccaaactcatcatttatgaggtcagtcatcggccctcaggggtccctgatcgcttctctgggtccaagtctggcaacacggcctccctgaccatctctgggctccaggctgaggacgaggctgattattattgcagctcatatataagtagcctcacttatgtgctgttcggcggagggaccaagctgaccgtcctgggtcagcccaaggctgccccctcggtcactctgttcccgccctcctctgaggagcttcaagccaacaaggccacactggtgtgtctcataagtgacttctacccgggagccgtgacagtggcctggaaggcagatagcagccccgtcaaggcgggagtggagaccaccacaccctccaaacaaagcaacaacaagtacgcggccagcagctacctgagcctgacgcctgagcagtggaagtcccacagaagctacagctgccaggtcacgcatgaagggagcaccgtggagaagacagtggcccctacagaatgttca

SEQ ID NO: 2471 - DNA, 648 bp, Artificial Sequence
  Synthetic polynucleotide encoding artificial human antibody VL chain
ccctctgtgttgacgcagccgccctcagtgtctgcggccccaggacagaaggtcaccatctcctgctctggaagcagctccaacattgggaacaattatgtgtcctggtaccagcagctcccaggaacagcccccaaactcctcatttatgacaataataagcgaccctcagggatccgtgaccgattctctggctccaagtctggcacctcagccaccctgggcatcaccggactccagactggggacgaggccgactattactgcggaacatgggatagtagcctgagtgttggggtgttcggcggagggaccaagctgaccgtcctaggtcagcccaaggctgccccctcggtcactctgttcccgccctcctctgaggagcttcaagccaacaaggccacactggtgtgtctcataagtgacttctacccgggagccgtgacagtggcctggaaggcagatagcagccccgtcaaggcgggagtggagaccaccacaccctccaaacaaagcaacaacaagtacgcggccagcagctacctgagcctgacgcctgagcagtggaagtcccacaaaagctacagctgccaggtcacgcatgaagggagcaccgtggagaagacagtggcccctacagaatgttca

SEQ ID NO: 2472 - DNA, 657 bp, Artificial Sequence
  Synthetic polynucleotide encoding artificial human antibody VL chain
ggggttgtgatgactcagtctccactctccctgcccgtcacccttggacagccggcctccatctcctgcaggtctagtcaaagcctcgtatacagtgatggaaacacctacttgaattggtttcagcagaggccaggccaatctccaaggcgcctaatttataaggtttctaaccgggactctggggtcccagacagattcagcggcagtgggtcaggcactgatttcacactgaaaatcagcagggtggaggctgaggatgttggggtttattactgcatgcaaggtacacactggccgatcaccttcggccaagggacacgactggagattaaacgaactgtggctgcaccatctgtcttcatcttcccgccatctgatgagcagttgaaatctggaactgcctctgttgtgtgcctgctgaataacttctatcccagagaggccaaagtacagtggaaggtggataacgccctccaatcgggtaactcccaggagagtgtcacagagcaggacagcaaggacagcacctacagcctcagcagcaccctgacgctgagcaaagcagactacgagaaacacaaagtctacgcctgcgaagtcacccatcagggcctgagctcgcccgtcacaaagagcttcaacaggggagagtgg

SEQ ID NO: 2473 - DNA, 325 bp, Artificial Sequence
  Synthetic polynucleotide encoding artificial human antibody VL chain
gaaattgtgttgacgcagtctccaggcaccctgtctttgtctccaggggaaagagccaccctctcctgcagggccagtcagagtattagaagcagctacttagcctggtaccagcagaaacctggccaggctcccaggctcctcatctatggtgcatccagcagggccactggcatcccagacaggttcagtggcagtgggtctgggacagacttcactctcaccatcagcagactggagcctgaagattttgcagtgtattactgtcagcagtatgatagctcatcgtggacgttcggccaagggaccaaggtggaaatcaaac

SEQ ID NO: 2474 - DNA, 651 bp, Artificial Sequence
  Synthetic polynucleotide encoding artificial human antibody VL chain
ccctctgtgctgacgcagccgccctcagtgtctggggccccagggcagagggtcaccatctcctgctctgggagcacctccaacatcggggctggttatgatgtacactggtaccagcaatttccaggaacagcccccaaactcctcatctatggtaacatctttcggccgtcaggggtccctgaccgattctctggctccaagtctggcacctcagcctccctggccatcactgggctccaggctgaggacgaggctgcttattactgccagtcgtatgacagcagcctgagaggtgtggtgttcggcggagggacctacctgaccgtcctaggtcagcccaaggctgccccctcggtcactctgttcccgccctcctctgaggagcttcaagccaacaaggccacactggtgtgtctcataagtgacttctacccgggagccgtgacagtggcctggaaggcagatagcagccccgtcaaggcgggagtggagaccaccacaccctccaaacaaagcaacaacaagtacgcggccagcagctatctgagcctgacgcctgagcagtggaagtcccacagaagctacagctgccaggtcacgcatgaagggagcaccgtggagaagacagtggcccctacagaatgttca

SEQ ID NO: 2475 - DNA, 644 bp, Artificial Sequence
  Synthetic polynucleotide encoding artificial human antibody VL chain
gtgacatccagatgacccagtctccatcctccctgtctgcatctgtaggagacagagtcaccatcacttgccgggcaagtcagagcattagcagctatttaaattggtatcagcagaaaccagggaaagcccctaagctcctgatctatgctgcatccagtttgcaaagtggggtcccatcaaggttcagtggcagtggatctgggacagatttcactctcaccatcagcagtctgcaacctgaagattttgcaacttactactgtcaacagagttacagtacccctcggacgttcggccaagggaccaaggtggaaatcaaacgaactgtggctgcaccatctgtcttcatcttcccgccatctgatgagcagttgaaatctggaactgcctctgttgtgtgcctgctgaataacttctatcccagagaggccaaagtacagtggaaggtggataacgccctccaatcgggtaactcccaggagagtgtcacagagcaggacagcaaggacagcacctacagcctcagcagcaccctgacgctgagcaaagcagactacgagaaacacaaagtctacgcctgcgaagtcacccatcagggcctgagctcgcccgtcacaaagagcttcaacaggggagagtgg

SEQ ID NO: 2476 - DNA, 660 bp, Artificial Sequence
  Synthetic polynucleotide encoding artificial human antibody VL chain
ggcatcgtgatgacccagtctccagactccctggctgtgtctctgggcgagagggccaccatcaactgcaagtccagccagaatgttttatacagttccaacaataaaaactacttaggttggtaccagcagaaaccaggacagcctcctaagttgctcatttactgggcatctacccgggaatcgggggtccctgaccgattcagtggcagcgggtctgggacagatttcactctcaccatcaacagcctgcaggctgaagatgtggcagtttattactgtcagcaatattatagcactccgtggacgttcggccaagggaccaaggtggaaatcaaacgaactgtggctgcaccatctgtcttcatcttcccgccatctgatgagcagttgaaatctggaactgcctctgttgtgtgcctgctgaataacttctatcccagagaggccaaagtacagtggaaggtggataacgccctccaatcgggtaactcccaggagagtgtcacagagcaggacagcaaggacagcacctacagcctcagcagcaccctgacgctgagcaaagcagactacgagaaacacaaagtctacgcctgcgaagtcacccatcagggcctgagctcgcccgtcacaaagagcttcaacaggggagagtgg

SEQ ID NO: 2477 - DNA, 657 bp, Artificial Sequence
  Synthetic polynucleotide encoding artificial human antibody VL chain
ccgtctgtgctgacgcagccgccctcagtgtctggggccccagggcagaaggtcaccatctcctgcactgggagcagctccaacatcggggcaggttatgatgtacactggtaccagcagcttccaggaacagcccccaaactcctcatctatcgtaacaacaatcggccctcaggggtccctgaccgattctctggctccaagtctggcacctcagcctccctggccatcactggactccagactgaggatgaggctgattattactgccagtcctatgacagcggcctgagtggttcgaaggtggtcttcggcggagggaccaagctgaccgtcctaggtcagcccaaggctgccccctcggtcactctgttcccgccctcctctgaggagcttcaagccaacaaggccacactggtgtgtctcataagtgacttctacccgggagccgtgacagtggcctggaaggcagatagcagccccgtcaaggcgggagtggagaccaccacaccctccaaacaaagcaacaacaagtacgcggccagcagctatctgagcctgacgcctgagcagtggaagtcccacagaagctacagctgccaggtcacgcatgaagggagcaccgtggagaagacagtggcccctacagaatgttca

SEQ ID NO: 2478 - DNA, 648 bp, Artificial Sequence
  Synthetic polynucleotide encoding artificial human antibody VL chain
cattttatgctgactcagccccactctgtgtcggagtctccggggaagacggtaaccatctcctgcacccgcagcagtggcagcattgccagcagctatgtgcagtggtaccagcagcgcccgggcagttcccccaccactatgatctatgaggataaaaaaagaccctctggtgtccctgatcgcttctctggctccatcgacagctcctccaactctgcctccctcaccatctctggactgaagactgaggacgaggctgactactactgtcagtcttatgatctcagcacttgggtgttcggcggagggaccaagctgaccgtcctaggtcagcccaaggctgccccctcggtcactctgttcccgccctcctctgaggagcttcaagccaacaaggccacactggtgtgtctcataagtgacttctacccgggagccgtgacagtggcctggaaggcagatagcagccccgtcaaggcgggagtggagaccaccacaccctccaaacaaagcaacaacaagtacgcggccagcagctacctgagcctgacgcctgagcagtggaagtcccacagaagctacagctgccaggtcacgcatgaagggagcaccgtggagaagacagtggcccctacagaatgttca

SEQ ID NO: 2479 - DNA, 642 bp, Artificial Sequence
  Synthetic polynucleotide encoding artificial human antibody VL chain
gacatccagatgacccagtctccattctccctgtctgcatctgttggagacagagtcaccatcacttgccgggcaagtcagagcattagcagctatttaaattggtatcagcagaaaccagggaaagcccctaagctcctgatctatgctgcatccagtttgcaaagtggggtcccatcaaggttcagtggcagtggatctgggacagatttcactctcaccatcagcagtctgcaacctgaagattttgcaacttactactgtcaccagagttacagtacctctctcactttcggcggagggaccaaggtggagatcaaacgaactgtggctgcaccatctgtcttcatcttcccgccatctgatgagcagttgaaatctggaactgcctctgttgtgtgcctgctgaataacttctatcccagagaggccaaagtacagtggaaggtggataacgccctccaatcgggtaactcccaggagagtgtcacagagcaggacagcaaggacagcacctacagcctcagcagcaccctgacgctgagcaaagcagactacgagaaacacaaagtctacgcctgcgaagtcacccatcagggcctgagctcgcccgtcacaaagagcttcaacaggggagagtgt

SEQ ID NO: 2480 - DNA, 642 bp, Artificial Sequence
  Synthetic polynucleotide encoding artificial human antibody VL chain
tcctatgtgctgactcagccaccctcagtgtcagtggccccaggaaagacggccaggattacctgtgggggaaacaacattggaagtaaaagtgtgcactggtaccagcagaagccaggccaggcccctgtgctggtcatctattatgatagcgaccggccctcagggatccctgagcgattctctggctccaactctgggaacacggccaccctgaccatcagcagggtcgaagccggggatgaggccgactattactgtcaggtgtgggatagtagtagtgatcattgggtgttcggcggagggaccaagctgaccgtcctaggtcagcccaaggctgccccctcggtcactctgttcccgccctcctctgaggagcttcaagccaacaaggccacactggtgtgtctcataagtgacttctacccgggagccgtgacagtggcctggaaggcagatagcagccccgtcaaggcgggagtggagaccaccacaccctccaaacaaagcaacaacaagtacgcggccagcagctacctgagcctgacgcctgagcagtggaagtcccacaaaagctacagctgccaggtcacgcatgaagggagcaccgtggagaagacagtggcccctacagaatgttca

SEQ ID NO: 2481 - DNA, 648 bp, Artificial Sequence
  Synthetic polynucleotide encoding artificial human antibody VL chain
cagtctgccctgactcagcctgcctccgtgtctgggtctcctggacagtcgatcaccatctcctgcactggaaccagcagtgacgttggtggttataactatgtctcctggtaccaacagcacccaggcaaagcccccaaactcatgatttatgatgtcagtaatcggccctcaggggtttctaatcgcttctctggctccaagtctggcaacacggcctccctgaccatctctgggctccaggctgaggacgaggctgattattactgcagctcatatacaagcagcagcactcaggtattcggcggagggaccaagctgaccgtcctaggtcagcccaaggctgccccctcggtcactctgttcccgccctcctctgaggagcttcaagccaacaaggccacactggtgtgtctcataagtgacttctacccgggagccgtgacagtggcctggaaggcagatagcagccccgtcaaggcgggagtggagaccaccacaccctccaaacaaagcaacaacaagtacgcggccagcagctatctgagcctgacgcctgagcagtggaagtcccacagaagctacagctgccaggtcacgcatgaagggagcaccgtggagaagacagtggcccctacagaatgttca

SEQ ID NO: 2482 - DNA, 644 bp, Artificial Sequence
  Synthetic polynucleotide encoding artificial human antibody VL chain
gtgacatccagatgacccagtctccatcctccctgtctgcatctgtaggagacagagtcaccatcacttgccgggcaagtcagagcattagcagctatttaaattggtatcagcagaaaccagggaaagcccctaagctcctgatctatgctgcatccagtttgcaaagtggggtcccatcaaggttcagtggcagtggatctgggacagatttcactctcaccatcagcagtctgcaacctgaagattttgcaacttactactgtcaacagagttacagtacccctaagacgttcggccaagggaccaaggtggaaatcaaacgaactgtggctgcaccatctgtcttcatcttcccgccatctgatgagcagttgaaatctggaactgcctctgttgtgtgcctgctgaataacttctatcccagagaggccaaagtacagtggaaggtggataacgccctccaatcgggtaactcccaggagagtgtcacagagcaggacagcaaggacagcacctacagcctcagcagcaccctgacgctgagcaaagcagactacgagaaacacaaagtctacgcctgcgaagtcacccatcagggcctgagctcgcccgtcacaaagagcttcaacaggggagagtgg

SEQ ID NO: 2483 - DNA, 325 bp, Artificial Sequence
  Synthetic polynucleotide encoding artificial human antibody VL chain
gccatccagttgacccagtctccatcctccctgtctgcatctgtaggcgacagagtcatcctcacttgccgggcaagtcagggcattaacagtgccttagcctggtatcagcaaaaaccagggaaacctcctaagctcctgatttatgctgcctccagtttggaaagtggggtcccatcgaggttcagcggcagtgggtctgggacagatttcactctcaccatcagcaacctgcagcctgaagattttgcaacttatttctgtcaacagtttaatacttaccctctgtacacctttggccaggggaccaagctggatatcacga

SEQ ID NO: 2484 - DNA, 328 bp, Artificial Sequence
  Synthetic polynucleotide encoding artificial human antibody VL chain
gtttcttctgagctgactcaggaccctgctgtgtctgtggccttgggacagacagtcaggatcacatgccaaggagacagcctcagaaggtattatgcaagctggtaccagcagaaggcaggacaggcccctatacttgtcatctatggtgaaaacaaccggccctcagggatcccagaccgattctctggctccggctcaggaaacacagcttccttgaccatcactggggctcaggcggaagatgaggctgactattactgtgactcccgggacagcagtggtaacctcgtggtattcggcggagggaccaagctgaccgtcctag

SEQ ID NO: 2485 - DNA, 642 bp, Artificial Sequence
  Synthetic polynucleotide encoding artificial human antibody VL chain
gacatccagatgacccagtccccatcttccgtgcctgcatctgtaggagacagagtcaccatcacttgtcgggcgagtcagggtattaggaattggttagcctggtatcggcagagaccagggaaagcccctgagctcctaatctatgctgcatccaatttgcaatttggggtcccatcaaggttcagcggcagtggatctgggacagacttcgctctcaccatcagcagcgtgcagcctgaagattttgcaacttactattgtcaacagactaacagtttcccccggactttcggccctgggaccaaagtggatatcaaacgaactgtggctgcaccatctgtcttcatcttcccgccatctgatgagcagttgaaatctggaactgcctctgttgtgtgcctgctgaataacttctatcccagagaggccaaagtacagtggaaggtggataacgccctccaatcgggtaactcccaggagagtgtcacagagcaggacagcaaggacagcacctacagcctcagcagcaccctgacgctgagcaaagcagactacgagaaacacaaagtctacgcctgcgaagtcacccatcagggcctgagctcgcccgtcacaaagagcttcaacaggggagagtgg

SEQ ID NO: 2486 - DNA, 645 bp, Artificial Sequence
  Synthetic polynucleotide encoding artificial human antibody VL chain
gacatccagatgacccagtctccatcctccctgtctgcatctgtaggagacagaatcaccatcacttgccgggcaagtcagagcgttggcacctatttaagttggtttcagcagaaaccagggaaagcccctaagctcctgatttatgctgcatccagtttacaaagtggggtcccgtcaaggttcagtggcagtggatccgggacagatttcactctcaccatcagcagtctgcaacctgaagattttgcaacttacttttgtcaacagagttacagtgtccctccgtggacgttcggccaagggaccaaggtggaaatcaaacgaactgtggctgcaccatctgtcttcatcttcccgccatctgatgagcagttgaaatctggaactgcctctgttgtgtgcctgctgaataacttctatcccagagaggccaaagtacagtggaaggtggataacgccctccaatcgggtaactcccaggagagtgtcacagagcaggacagcaaggacagcacctacagcctcagcagcaccctgacgctgagcaaagcagactacgagaaacacaaagtctacgcctgcgaagtcacccatcagggcctgagctcgcccgtcacaaagagcttcaacaggggagagtgg

SEQ ID NO: 2487 - DNA, 648 bp, Artificial Sequence
  Synthetic polynucleotide encoding artificial human antibody VL chain
gaagttgtattgacgcagtctccaggcaccctgtctttgtctccaggggaaagagcgaccctctcctgcagggccagtcagagcgttagcagtaattacttagcctggtaccagcaaaaacttggccaggctcccaggctcctcatctatggtgcatccagcagggccactggcatcccagacaggttcagtggcagtgggtctgggacagacttcactctcaccatcagcagactggaggctgaagattttgcagtgtattactgtcagcaatatggtagctcacctcggtacacttttggccaggggaccaaggtggagatcagacgaactgtggctgcaccatctgtcttcatcttcccgccatctgatgagcagttgaaatctggaactgcctctgttgtgtgcctgctgaataacttctatcccagagaggccaaagtacagtggaaggtggataacgccctccaatcgggtaactcccaggagagtgtcacagagcaggacagcaaggacagcacctacagcctcagcagcaccctgacgctgagcaaagcagactacgagaaacacaaactctacgcctgcgaagtcacccatcagggcctgagctcgcccgtcacaaagagcttcaacaggggagagtgg

SEQ ID NO: 2488 - DNA, 644 bp, Artificial Sequence
  Synthetic polynucleotide encoding artificial human antibody VL chain
cagaaattgtgttgacgcagtctccaggcaccctgtctttgtctccaggggaaagagccaccctctcctgcagggccagtcagagtgttagcagcaggtacttagcctggtaccagcagaaacctggccaggctcccaggctcctcatccatggtgcatccagcagggccactggcatcccagacaggttcagtggcagtgggtctgggacagacttcactctcaccatcagcagactggagcctgaagattttgcagtgtattactgtcagcagtatggtagcgcgtggacgttcggccaagggaccaaggtggaaatcaaacgaactgtggctgcaccatctgtcttcatcttcccgccatctgatgagcagttgaaatctggaactgcctctgttgtgtgcctgctgaataacttctatcccagagaggccaaagtacagtggaaggtggataacgccctccaatcgggtaactcccaggagagtgtcacagagcaggacagcaaggacagcacctacagcctcagcagcaccctgacgctgagcaaagcagactacgagaaacacaaagtctacgcctgcgaagtcacccatcagggcctgagctcgcccgtcacaaagagcttcaacaggggagagtgg

SEQ ID NO: 2489 - DNA, 645 bp, Artificial Sequence
  Synthetic polynucleotide encoding artificial human antibody VL chain
gaaattgtgttgacacagtctccagccaccctgtccttgtctccaggggaaagagccaccctctcctgcagggccagtcagagtgttggcagctccttagcctggtaccaacagaaacctggccaggctcccaggctcctcatctttgattcatccaacagggccactgccatcccagccaggttcactggcagtgggtctgggacagacttcactctcaccatcagcagcctagagcctgaagattttgcagtttattactgtcagcagcgtgccaactggcctcctatcaccttcggccaagggacacgactggacattagacgaactgtggctgcaccatctgtcttcatcttcccgccatctgatgagcagttgaaatctggaactgcctctgttgtgtgcctgctgaataacttctatcccagagaggccaaagtacagtggaaggtggataacgccctccaatcgggtaactcccaggagagtgtcacagagcaggacagcaaggacagcacctacagcctcagcagcaccctgacgctgagcaaagcagactacgagaaacacaaagtctacgcctgcgaagtcacccatcagggcctgagctcgcccgtcacaaagagcttcaacaggggagagtgt

SEQ ID NO: 2490 - DNA, 644 bp, Artificial Sequence
  Synthetic polynucleotide encoding artificial human antibody VL chain
gtgacatccagatgacccagtctccttccaccctgtctgcatctgtaggagacagagtcaccatcacttgccgggccagtcagagtattagtagctggttggcctggtatcagcagaaaccagggaaagcccctaagctcgtgatctataaggcatctagtttaaaaagtggggtcccatcaaggttcagcggcagtggatctgggacagagttcactctcaccatcagcagcctgcagcctgatgattttgctacttattactgccaacagtataatagttacccgtggacgttcggccaagggaccaaggtggaaatcaaacgaactgtggctgcaccatctgtcttcatcttcccgccatctgatgagcagttgaaatctggaactgcctctgttgtgtgcctgctgaataacttctatcccagagaggccaaagtacagtggaaggtggataacgccctccaatcgggtaactcccaggagagtgtcacagagcaggacagcaaggacagcacctacagcctcagcagcaccctgacgctgagcaaagcagactacgagaaacacaaagtctacgcctgcgaagtcacccatcagggcctgagctcgcccgtcacaaagagcttcaacaggggagagtgg

SEQ ID NO: 2491 - DNA, 645 bp, Artificial Sequence
  Synthetic polynucleotide encoding artificial human antibody VL chain
ccctatgtgctgactcagccaccctcagtgtcagtggccccaggaaagacggccaggattacctgtgggggaaacaacattggaagtaaaagtgtgcactggtaccagcagaagccaggccaggcccctgtgctggtcatctattatgatagcgaccggccctcagggatccctgagcgattctctggctccaactctgggaacacggccaccctgaccatcagcagggtcgaagccggggatgaggccgactattactgtcaggtgtgggatagtagtagtgatcattatgtggtattcggcggagggaccaagctgaccgtcctaggtcagcccaaggctgccccctcggtcactctgttcccgccctcctctgaggagcttcaagccaacaaggccacactggtgtgtctcataagtgacttctacccgggagccgtgacagtggcctggaaggcagatagcagccccgtcaaggcgggagtggagaccaccacaccctccaaacaaagcaacaacaagtacgcggccagcagctacctgagcctgacgcctgagcagtggaagtcccacagaagctacagctgccaggtcacgcatgaagggagcaccgtggagaagacagtggcccctacagaatgttca

SEQ ID NO: 2492 - DNA, 327 bp, Artificial Sequence
  Synthetic polynucleotide encoding artificial human antibody VL chain
gagaaattgtgttgacacagtctccagccaccctgtctttgtctccaggggaaagagccaccctctcctgcagggccagtcagagtgttagcacctacttagcctggtaccaacagaaacctggccaggctcccaggctcctcatctatgatgcatccaacagggccactggcatcccagccaggttcagtggcagtgggtctgggacagacttcactctcaccatcagcagcctagagcctgaagattttgcagtttattactgtcagcagcgtagcaactggcctccgctcactttcggcggagggaccaaggtggagatcgaac

SEQ ID NO: 2493 - DNA, 659 bp, Artificial Sequence
  Synthetic polynucleotide encoding artificial human antibody VL chain
gggatattgtgatgactcagtctccactctccctgcccgtcacccctggagagccggcctccatctcctgcaggtctagtcagagcctcctgcatagtaatggatacaactatttggattggtacgtgcagaagccagggcagtctccacagctcctgatctatttggggtctaatcgggcctccggggtcactgacaggctcagtggcagtggatcaggcacagatttcacactggaaatcggcagagtggaggctgaggatgttggggtttattactgcatgcaagctctacaaactccctacacttttggccaggggaccaagctggagatcagacgaactgtggctgcaccatctgtcttcatcttcccgccatctgatgagcagttgaaatctggaactgcctctgttgtgtgcctgctgaataacttctatcccagagaggccaaagtacagtggaaggtggataacgccctccaatcgggtaactcccaggagagtgtcacagagcaggacagcaaggacagcacctacagcctcagcagcaccctgacgctgagcaaagcagactacgagaaacacaaagtctacgcctgcgaagtcacccatcagggcctgagctcgcccgtcacaaagagcttcaacaggggagagtgt

SEQ ID NO: 2494 - DNA, 641 bp, Artificial Sequence
  Synthetic polynucleotide encoding artificial human antibody VL chain
gtgacatccagatgacccagtctccttccaccctgtctgcatctgtaggagacagagtcaccatcacttgccgggccagtcagagtattagtagctggttggcctggtatcagcagaaaccagggaaagcccctaagctcctgatctataaggcgtctagtttagaaagtggggtcccatcaaggttcagcggcagtggatctgggacagaattcactctcaccatcagcagcctgcagcctgatgattttgcaacttattactgccaacagtataatagttattcgacgttcggccaagggaccaaggtggaaatcaaacgaactgtggctgcaccatctgtcttcatcttcccgccatctgatgagcagttgaaatctggaactgcctctgttgtgtgcctgctgaataacttctatcccagagaggccaaagtacagtggaaggtggataacgccctccaatcgggtaactcccaggagagtgtcacagagcaggacagcaaggacagcacctacagcctcagcagcaccctgacgctgagcaaagcagactacgagaaacacaaagtctacgcctgcgaagtcacccatcagggcctgagctcgcccgtcacaaagagcttcaacaggggagagtgg

SEQ ID NO: 2495 - DNA, 333 bp, Artificial Sequence
  Synthetic polynucleotide encoding artificial human antibody VL chain
ctcagactgtggtgacccaggagccgtcggtctcagtgtcccctggagggacagtcacactcacttgtggcttgaggtctggctcagtctcaactggaaactaccccagctggtaccagcagaccccaggccaggctccacgcactctcatctacaacattaatactcggtcgtccggggtccctcatcgcttctctgcctccattattgataacagagctgccctcaccatcacgggggcccagtcagatgatgaatctctttattactgtttgctatatatgggcagtggcatttcggttttcggcggagggaccaaggtgaccgtcttag

SEQ ID NO: 2496 - DNA, 648 bp, Artificial Sequence
  Synthetic polynucleotide encoding artificial human antibody VL chain
gaaattgtcttgacgcagtctccaggcaccctgtcttcgactctaggtgaaagagccaccctctcctgcagggccagtcagagtgttagcagcagctacttagcctggtaccaacagaaacctggccaggctcccaggctcctcatctatggtgcatcccgcagggccactggcatcccagacaggttcagtggcagtgggtctgggacagacttcactctcaccatcagcagactggagcctgaagattttgcagtgtattactgtcagcactatggtgcctcaccgccgtggacgttcggccaagggaccaaggtggaaatcaaacgaactgtggctgcaccatctgtcttcatcttcccgccatctgatgagcagttgaaatctggaactgcctctgttgtgtgcctgctgaataacttctatcccagagaggccaaagtacagtggaaggtggataacgccctccaatcgggtaactcccaggagagtgtcacagagcaggacagcaaggacagcacctacagcctcagcagcaccctgacgctgagcaaagcagactacgagaaacacaaagtctacgcctgcgaagtcacccatcagggcctgagctcgcccgtcacaaagagcttcaacaggggagagtgt

SEQ ID NO: 2497 - DNA, 645 bp, Artificial Sequence
  Synthetic polynucleotide encoding artificial human antibody VL chain
ccctatgtgctgactcagccaccctcggtgtcagtggccccaggacagacggccagaattacctgtgggggaaacaacattggaagtaagagtgtgcactggtaccagcagaagccaggccaggcccctgtgatggtcgtctatgctgatagagagcggccctcagggatccccgagcgactctctggctccaactttgggaacacggccaccctgaccatcagcagggtcgaagccggggatgaggccgactattactgtcaggtgtgggatagtaataatgatcaccgggaggtgttcggcggagggaccaagctgaccgtcctaggtcagcccaaggctgccccctcggtcactctgttcccgccctcctctgaggagcttcaagccaacaaggccacactggtgtgtctcataagtgacttctacccgggagccgtgacagtggcctggaaggcagatagcagccccgtcaaggcgggagtggagaccaccacaccctccaaacaaagcaacaacaagtacgcggccagcagctacctgagcctgacgcctgagcagtggaagtcccacaaaagctacagctgccaggtcacgcatgaagggagcaccgtggagaagacagtggcccctacagaatgttca

SEQ ID NO: 2498 - DNA, 642 bp, Artificial Sequence
  Synthetic polynucleotide encoding artificial human antibody VL chain
gacatccagatgacccagtctccttccaccctgtctgcatctgtaggagacagagtcaccatcacttgccgggccagtcagagtattagtaggtggttggcctggtatcagcagaaaccagggaaagcccctaaactcctgatctataaggcgtctgctttagaaagtggggtcccatcaaggttcagcggcagtggatctgggacagaattcactctcaccatcagcagcctgcaacctgatgattttgcaacttattactgccaacagtatgatagttatcctctctctttcggcggagggaccaaggtggagatcaaacgaactgtggctgcaccatctgtcttcatcttcccgccatctgatgagcagttgaaatctggaactgcctctgttgtgtgcctgctgaataacttctatcccagagaggccaaagtacagtggaaggtggataacgccctccaatcgggtaactcccaggagagtgtcacagagcaggacagcaaggacagcacctacagcctcagcagcaccctgacgctgagcaaagcagactacgagaaacacaaagtctacgcctgcgaagtcacccatcagggcctgagctcgcccgtcacaaagagcttcaacaggggagagtgg

SEQ ID NO: 2499 - DNA, 642 bp, Artificial Sequence
  Synthetic polynucleotide encoding artificial human antibody VL chain
gcaacgacactcacgcagtctccagcattcatgtcagcgactccaggagacagagtcaacatctcctgcaaagccagccaagacattgatgatgatatgaactggtaccaacagaaaccaggagaagctgctattttcattattcaagaagctactactctcgttcctggcgtcccacctcgattcagtggcagcgggtatgggacagattttaccctcacaattaataacatagaatctgaggatgctgcatattacttctgtctacaacatgataatttcccgtacacttttggccaggggaccaagctggagatcaaacgaactgtggctgcaccatctgtcttcatcttcccgccatctgatgagcagttgaaatctggaactgcctctgttgtgtgcctgctgaataacttctatcccagagaggccaaagtacagtggaaggtggataacgccctccaatcgggtaactcccaggagagtgtcacagagcaggacagcaaggacagcacctacagcctcagcagcaccctgacgctgagcaaagcagactacgagaaacacaaagtctacgcctgcgaagtcacccatcagggcctgagctcgcccgtcacaaagagcttcaacaggggagagtgg

SEQ ID NO: 2500 - DNA, 645 bp, Artificial Sequence
  Synthetic polynucleotide encoding artificial human antibody VL chain
gaaattgtgttgacgcagtctccaggcaccctgtctttgtctccaggggaaagagccatcctctcctgcagggccggtcagagtattggcgccgcctacttagcctggtaccaacagaaacctggccaggctcccagactcctcatctctggtgcatccaggagggccactggcatcccagacaggttcagtggcagtgggtctgggacagacttcactctcaccatcagcagactagagcctgaagattttgcagtgtattactgtcagcaatacggcagttcaccgctcaccttcggcggagggaccaaggtggagatcaaacgaactgtggctgcaccatctgtcttcatcttcccgccatctgatgagcagttgaaatctggaactgcctctgttgtgtgcctgctgaataacttctatcccagagaggccaaagtacagtggaaggtggataacgccctccaatcgggtaactcccaggagagtgtcacagagcaggacagcaaggacagcacctacagcctcagcagcaccctgacgctgagcaaagcagactacgagaaacacaaagtctacgcctgcgaagtcacccatcagggcctgagctcgcccgtcacaaagagcttcaacaggggagagtgt

SEQ ID NO: 2501 - DNA, 642 bp, Artificial Sequence
  Synthetic polynucleotide encoding artificial human antibody VL chain
ctctatgagctgacacagccaccctcggtgtcagtgtccccaggacaaacggccaggatcacctgctctggagatgcattgccaaaaaaatatgcttattggtaccagcagaagtcaggccaggcccctgtgctggtcatctatgaggacagcaaacgaccctccgggatccctgagagattctctggctccagctcagggacaatggccaccttgactatcagtggggcccaggtggaggatgaagctgactactactgttactcaacagacagcagtggtaatcatggggtgttcggcggagggaccaagctgaccgtcctaggtcagcccaaggctgccccctcggtcactctgttcccaccctcctctgaggagcttcaagccaacaaggccacactggtgtgtctcataagtgacttctacccgggagccgtgacagtggcctggaaggcagatagcagccccgtcaaggcgggagtggagaccaccacaccctccaaacaaagcaacaacaagtacgcggccagcagctacctgagcctgacgcctgagcagtggaagtcccacaaaagctacagctgccaggtcacgcatgaagggagcaccgtggagaagacagtggcccctacagaatgttca

SEQ ID NO: 2502 - DNA, 659 bp, Artificial Sequence
  Synthetic polynucleotide encoding artificial human antibody VL chain
gggatattgtgatgactcagtctccactctccctgcccgtcacccctggagagccggcctccatctcctgcaggtctagtcagagcctcctgcatagtgatggatacaactatttggattggtacctgcagaagccagggcagtctccacagctcctgatctacttgggttctaatcgggcctccggggtccctgacaggttcagtggcagtggatcaggcacagattttacactgaaaatcagcagagtggaggctgaggatgttggggtttattactgcatgcaagctctacaaactcctaacacttttggccaggggaccaagctggagatcaaacgaactgtggctgcaccatctgtcttcatcttcccgccatctgatgagcagttgaaatctggaactgcctctgttgtgtgcctgctgaataacttctatcccagagaggccaaagtacagtggaaggtggataacgccctccaatcgggtaactcccaggagagtgtcacagagcaggacagcaaggacagcacctacagcctcagcagcaccctgacgctgagcaaagcagactacgagaaacacaaagtctacgcctgcgaagtcacccatcagggcctgagctcgcccgtcacaaagagcttcaacaggggagagtgt

SEQ ID NO: 2503 - DNA, 651 bp, Artificial Sequence
  Synthetic polynucleotide encoding artificial human antibody VL chain
cagtctgccctgactcagcctgcctccgtgtctgggtctcctggacagtcgatcaccatctcctgcactggaaccagcagtgacgttggtggttataactatgtctcctggtaccaacaccacccagacaaagcccccaaactcataatttatgaggtcaagaatcggccctcaggggtttctaatcgcttctctggctccaagtctgacaacacggcctccctgaccatctctgggctccaggctgaggacgaggctgattattactgcaactcatattcaagcagcagcactctttatgtcttcggaactgggaccaaggtcaccgtcctaagtcagcccaaggccaaccccactgtcactctgttcccgccctcctctgaggagctccaagccaacaaggccacactagtgtgtctgatcagtgacttctacccgggagctgtgacagtggcctggaaggcagatagcagccccgtcaaggcgggagtggagaccaccaaaccctccaaacagagcaacaacaagtacgcggccagcagctacctgagcctgacgcctgagcagtggaagtcccacagaagctacagctgccaggtcacgcatgaagggagcaccgtggagaagacagtggcccctacagaatgttca

SEQ ID NO: 2504 - DNA, 647 bp, Artificial Sequence
  Synthetic polynucleotide encoding artificial human antibody VL chain
gagaaattgtgttgacgcagtctccagccaccctgtctttgtctccaggggaaagagccaccctctcctgcagggccagtcagagtattagcagtaacttagcctggtaccaacagaaacctggccaggctcccaggctcctcatctatgatgcatccaacagggccactggcatcccagccaggttcagtggcagtgggtctgggacagacttcactctcaccatcagcagcctcgagcctgaagattttgcagtttattactgtcaacaacatagcaactggcctgagctcactttcggcggagggaccaaggtggagatcaaacgaactgtggctgcaccatctgtcttcatcttcccgccatctgatgagcagttgaaatctggaactgcctctgttgtgtgcctgctgaataacttctatcccagagaggccaaagtacagtggaaggtggataacgccctccaatcgggtaactcccaggagagtgtcacagagcaggacagcaaggacagcacctacagcctcagcagcaccctgacgctgagcaaagcagactacgagaaacacaaagtctacgcctgcgaagtcacccatcagggcctgagctcgcccgtcacaaagagcttcaacaggggagagtgt

SEQ ID NO: 2505 - DNA, 648 bp, Artificial Sequence
  Synthetic polynucleotide encoding artificial human antibody VL chain
gcctctgccctgactcagcctgcctccgtgtctgggtctcctggacagtcgatcaccatctcctgcactggaaccagcagtgacgttggtggttataactatgtctcctggtaccaacaacacccaggcaaagcccccaaactcatgatttatgatgtcagtaatcggccctcaggggtttctaatcgcttctctggctccaagtctggcaacacggcctccctgaccatctctgggctccaggctgaggacgaggctgattattactgcagctcgtatagaagcagcggcgtttatgtcttcggaactgggaccaaggtcaccgtcctaggtcagcccaaggccaaccccactgtcactctgttcccgccctcctctgaggagctccaagccaacaaggccacactagtgtgtctgatcagtgacttctacccgggagctgtgacagtggcctggaaggcagatggcagccccgtcaaggcgggagtggagaccaccaaaccctccaaacagagcaacaacaagtacgcggccagcagctacctgagcctgacgcccgagcagtggaagtcccacagaagctacagctgccaggtcacgcatgaagggagcaccgtggagaagacagtggcccctacagaatgttca

SEQ ID NO: 2506 - DNA, 657 bp, Artificial Sequence
  Synthetic polynucleotide encoding artificial human antibody VL chain
caagttgtgatgacccagactccactctctctgtccgtcacccctggacagccggcctccatctcctgcaagtctagtcagcgcctcctgcatagtgatggaaagacctatttgtattggtacctgcagaagccaggccagtctccacagctcctgatctatgaagtttccaaccggttctctggagtgccagataggttcagtggcagcgggtcagggacagatttcacactgaaaatcagccgggtggaggctgcggatgttggggtttattactgcatgcaaagtatacaccttccgtacacttttggccaggggaccaagctggagatcaaacgaactgtggctgcaccatctgtcttcatcttcccgccatctgatgagcagttgaaatctggaactgcctctgttgtgtgcctgctgaataacttctatcccagagaggccaaagtacagtggaaggtggataacgccctccaatcgggtaactcccaggagagtgtcacagagcaggacagcaaggacagcacctacagcctcagcagcaccctgacgctgagcaaagcagactacgagaaacacaaagtctacgcctgcgaagtcacccatcagggcctgagctcgcccgtcacaaagagcttcaacaggggagagtgg

SEQ ID NO: 2507 - DNA, 648 bp, Artificial Sequence
  Synthetic polynucleotide encoding artificial human antibody VL chain
gaaattgtgttgacgcagtctccaggcaccctgtctttgtctccaggggaaagagccaccctctcctgcagggccagtcagagtgtcagcagtagcttcttggcctggtaccagcagaaacctggccaggctcccagactcctcatctatggcgcatccagcagggccactggcgtcgcagacaggttcagtggcagtgggtctgggacagacttcactctcaccatcaacagactggagcctgaagattttgcagtgtattactgtcaccagtatggtggctcacctccaaacacttttggccaggggaccaaggtggagatcaaacgaactgtggctgcaccatctgtcttcatcttcccgccatctgatgagcagttgaaatctggaactgcctctgttgtgtgcctgctgaataacttctatcccagagaggccaaagtacagtggaaggtggataacgccctccaatcgggtaactcccaggagagtgtcacagagcaggacagcaaggacagcacctacagcctcagcagcaccctgacgctgagcaaagcagactacgagaaacacaaagtctacgcctgcgaagtcacccatcagggcctgagctcgcccgtcacaaagagcttcaacaggggagagtgt

SEQ ID NO: 2508 - DNA, 645 bp, Artificial Sequence
  Synthetic polynucleotide encoding artificial human antibody VL chain
gacatccagttgacccagtctccatccttcctgtctgcatctgtaggagacagagtcaccatcacttgccgggccagtcaggacgttgacacttatttagcctggtatcagcaaaaaccagggaaagcccctaagctcctgatctatgctgcatccactttgcacagtggggtcccatcaaggttcagcggcagtggagctgggacagaattcactctcacaatcagcagcctgcagcctgaagattttgcaacttattattgtcaacaacttaatagttaccctccactcactttcggcggggggaccaaggtggagatcaaacgaactgtggctgcaccatctgtcttcatcttcccgccatctgatgagcagttgaaatctggaactgcctctgttgtgtgcctgctgaataacttctatcccagagaggccaaagtacagtggaaggtggataacgccctccaatcgggtaactcccaggagagtgtcacagagcaggacagcaaggacagcacctacagcctcagcagcaccctgacgctgagcaaagcagactacgagaaacacaaagtctacgcctgcgaagtcacccatcagggcctgagctcgcccgtcacaaagagcttcaacaggggagagtgt

SEQ ID NO: 2509 - DNA, 648 bp, Artificial Sequence
  Synthetic polynucleotide encoding artificial human antibody VL chain
cagtctgtgttgacgcagccgccctcattatctgcggccccaggacagaaggtcataatctcctgctctggaagcagctccaatattgggaaatattctgttttctggtaccagcaagtcccaggaacaggccccaaactcctcatttttgacaataacagacgaccctctgggatccgtgaccgattctctgcctccaagtctggcacgtcagccaccctggagatcaccggcctccagactggggacgaggcacattattactgcgcaacatgggatagcagcctgactgctggggtgttcggcggagggaccaaactgaccgtcctacgtcagcccaaggctgccccctcggtcactctgttcccaccctcctctgaggagcttcaagccaacaaggccacactggtgtgtctcataagtgacttctacccgggagccgtgacagtggcctggaaggcagatggcagccccgtcaaggcgggagtggagaccaccacaccctccaaacaaagcaacaacaagtacgcggccagcagctacctgagcctgacgcctgagcagtggaagtcccacaaaagctacagctgccaggtcacgcatgaagggagcaccgtggagaagacagtggcccctacagaatgttca

SEQ ID NO: 2510 - DNA, 644 bp, Artificial Sequence
  Synthetic polynucleotide encoding artificial human antibody VL chain
gagaaattgtgttgacacagtctccagccaccctgtccttgtctccaggaaatagagccgccctctcctgcagggccagtcagagtgttggtagctccttacactggtatcaacagaaacctggccaggcccccaggctcctcatctatgatgtgtccaacagggccgctggcatcccaggcaggttcagtgccagtgggtctgggacagacttcactctcaccatcagcaacctagagcctgaagattttgcagtttattactgtcagcagcgtagcgcctggcctatcactttcggccaagggacacgactggagattaaacgaactgtggctgcaccatctgtcttcatcttcccgccatctgatgagcagttgaaatctggaactgcctctgttgtgtgcctgctgaataacttctatcccagagaggccaaagtacagtggaaggtggataacgccctccaatcgggtaactcccaggagagtgtcacagagcaggacagcaaggacagcacctacagcctcagcagcaccctgacgctgagcaaagcagactacgagaaacacaaagtctacgcctgcgaagtcacccatcagggcctgagctcgcccgtcacaaagagcttcaacaggggagagtgt

SEQ ID NO: 2511 - DNA, 650 bp, Artificial Sequence
  Synthetic polynucleotide encoding artificial human antibody VL chain
gagaaattgtgttgacgcagtctccaggcaccctgtctttgtctccaggggaaagagccaccctctcctgcagggccagtcagagtgttagcagcagctacttagcctggtaccagcagaaacctggccaggctcccaggctcctcatctctggtgcatccagcagggccactggcatcccagacaggttcagtggcagtgggtctgggacagacttcactctcaccatcagcagactggagcctgaagattttgcagtgtattactgtcagcagtatggtagctcacggaagctcactttcggcggagggaccaaggtggagatcaaacgaactgtggctgcaccatctgtcttcatcttcccgccatctgatgagcagttgaaatctggaactgcctctgttgtgtgcctgctgaataacttctatcccagagaggccaaagtacagtggaaggtggataacgccctccaatcgggtaactcccaggagagtgtcacagagcaggacagcaaggacagcacctacagcctcagcagcaccctgacgctgagcaaagcagactacgagaaacacaaagtctacgcctgcgaagtcacccatcagggcctgagctcgcccgtcacaaagagcttcaacaggggagagtgt

SEQ ID NO: 2512 - DNA, 322 bp, Artificial Sequence
  Synthetic polynucleotide encoding artificial human antibody VL chain
gacatccagatgacccagtctccttccaccctgtctgcatctgtaggagacagagtcaccatcacttgccgggccagtcagagtattagtgtctggttggcctggtatcaacagaaaccagggaaagcccctaaactcctgatctataaggcgtctactttagaagctggggtcccatcgaggttttccggcagcggatctgggacagaattttctctcactatcagcggcctacagcctgatgactttggaacttatttctgtcaacactatgacagttatccgtggacgttcggccaagggaccaaggtggagatgaaac

SEQ ID NO: 2513 - DNA, 645 bp, Artificial Sequence
  Synthetic polynucleotide encoding artificial human antibody VL chain
gtttcttccgagctgactcaggaccctgctgtgtctgtggccttgggacagacagtcaggatcacatgccaaggagacagtctcagaaggtattatgtaagctggtaccggcagaagccaggagaggcccctgtagttgtcatctatggtaaaaacaatcggccctcatggatcccagaccgactctctggctccagttcaggaaacacagcttccttgaccatcactggggctcaggcggaagatgaggctgactattactgttgttcccgggacagcagtggtaacccttgggtattcggcggagggaccaagctgaccgtcctaggtcagcccaaggctgccccctcggtcactctgttcccaccctcctctgaggagcttcaagccaacaaggccacactggtgtgtctcataagtgacttctacccgggagccgtgacagtggcctggaaggcagatagcagccccgtcaaggcgggagtggagaccaccacaccctccaaacaaagcaacaacaagtacgcggccagcagctacctgagcctgacgcctgagcagtggaagtcccacaaaagctacagctgccaggtcacgcatgaagggagcaccgtggagaagacagtggcccctacagaatgttca

SEQ ID NO: 2514 - DNA, 642 bp, Artificial Sequence
  Synthetic polynucleotide encoding artificial human antibody VL chain
gtcatccagatgacccagtctccaacctccctgtctgcatctgtaggagacagagtcaccatcacttgccgggcaagtcagagcattagcagctatttaaattggtatcagcagaaactagggaaagcccctaagctcctgatctatgctgcatccagtttgcaaagtggggtcccatcaaggttcagtggcagtggatctgggacagatttcactctcaccatcagcagtctgcaacctgaagattttgcaacttactactgtcaacagagttacagcacgtcgctcactttcggcggagggaccaaggtggagatcaaacgaactgtggctgcaccatctgtcttcatcttcccgccatctgatgagcagttgaaatctggaactgcctctgttgtgtgcctgctgaataacttctatcccagagaggccaaagtacagtggaaggtggataacgccctccaatcgggtaactcccaggagagtgtcacagagcaggacagcaaggacagcacctacagcctcagcagcaccctgacgctgagcaaagcagactacgagaaacacaaagtctacgcctgcgaagtcacccatcagggcctgagctcgcccgtcacaaagagcttcaacaggggagagtgt

SEQ ID NO: 2515 - DNA, 653 bp, Artificial Sequence
  Synthetic polynucleotide encoding artificial human antibody VL chain
gagaaattgtgttgacgcagtctccaggcaccctgtctttgtctccaggggaaagagccaccctctcctgcagggccagtcagagtgttagcagcagctacttagcctggtaccagcagaaacctggccaggctcccaggctcctcatctatgatgcatccagcagggccgctggcgtcccagacaggttcagtggcagtgggtctgggacagacttcactctcaccatcagcagactggagcctgaagattttgcagtgtatttctgtcagcagtatgatagctcacctcccatgtacacttttggccaggggaccaagctggagatcagacgaactgtggctgcaccatctgtcttcatcttcccgccatctgatgagcagttgaaatctggaactgcctctgttgtgtgcctgctgaataacttctatcccagagaggccaaagtacagtggaaggtggataacgccctccaatcgggtaactcccaggagagtgtcacagagcaggacagcaaggacagcacctacagcctcagcagcaccctgacgctgagcaaagcagactacgagaaacacaaagtctacgcctgcgaagtcacccatcagggcctgagctcgcccgtcacaaagagcttcaacaggggagagtgt

SEQ ID NO: 2516 - DNA, 651 bp, Artificial Sequence
  Synthetic polynucleotide encoding artificial human antibody VL chain
ccgtctgtgttgacgcagccgccctcagtgtctgcggccccaggacagaaggtcaccatctcctgctctggaagcagctccaacattgacaataattatgtatcctggtaccagcagctcccaggaacagcccccaaactcctcatctatgaaaataataagcgagcctcagggattcctgaccgattctctggctccaagtctggcacgtcagccaccctgggcatcaccggactccagactggggacgaggccgattattactgcggaacatgggatagcagcctgagtcctgggggggtattcggcggagggaccaagctgaccgtcctaggtcagcccaaggctgccccctcggtcactctgttcccgccctcctctgaggagcttcaagccaacaaggccacactggtgtgtctcataagtgacttctacccgggagccgtgacagtggcctggaaggcagatagcagccccgtcaaggcgggagtggagaccaccacaccctccaaacaaagcaacaacaagtacgcggccagcagctatctgagcctgacgcctgagcagtggaagtcccacagaagctacagctgccaggtcacgcatgaagggagcaccgtggagaagacagtggcccctacagaatgttca

SEQ ID NO: 2517 - DNA, 641 bp, Artificial Sequence
  Synthetic polynucleotide encoding artificial human antibody VL chain
gtgacatccagatgacccagtctccatcctccctgtctgcatctgtaggagacagagtcaccatcacttgccgggcaagtcagaccattagcacctacttaaattggtatcagcagaaaccagggaaagcccctaagctcctgatctatgctgcatccagtttacagagtggggtcccatcaaggttcagtggcagtggatctgagacagatttcactctcaccatcagcagtctgcaacctgaagattttgcaacttactactgtcaacagagttacaatgcccggacgttcggccaagggaccaaggtggaaatcaaacgaactgtggctgcaccatctgtcttcatcttcccgccatctgatgagcagttgaaatctggaactgcctctgttgtgtgcctgctgaataacttctatcccagagaggccaaagtacagtggaaggtggataacgccctccaatcgggtaactcccaggagagtgtcacagagcaggacagcaaggacagcacctacagcctcagcagcaccctgacgctgagcaaagcagactacgagaaacacaaagtctacgcctgcgaagtcacccatcagggcctgagctcgcccgtcacaaagagcttcaacaggggagagtgt

SEQ ID NO: 2518 - DNA, 665 bp, Artificial Sequence
  Synthetic polynucleotide encoding artificial human antibody VL chain
gggacatcgtgatgacccagtctccagactccctggctgtgtctctgggcgagagggccaccatcaactgcaagtccagccagactgttttacacagttccaacaataggaactacttagcttggtatcagcacaaaccaggccagcctcctaagctgctcatttactgggcttctacccgggaatccggggtccctgaccgattcagtggcagcgggtctgggacagatttcactctcaccatcaacagccttcaggctgaagatgtggctgtttattactgtcagcaatattatgatactgctccgctcactttcggcggcgggaccaaggtggagatcaaacgaactgtggctgcaccatctgtcttcatcttcccgccatctgatgagcagttgaaatctggaactgcctctgttgtgtgcctgctgaataacttctatcccagagaggccaaagtacagtggaaggtggataacgccctccaatcgggtaactcccaggagagtgtcacagagcaggacagcaaggacagcacctacagcctcagcagcaccctgacgctgagcaaagcagactacgagaaacacaaagtctacgcctgcgaagtcacccatcagggcctgagctcgcccgtcacaaagagcttcaacaggggagagtgt

SEQ ID NO: 2519 - DNA, 642 bp, Artificial Sequence
  Synthetic polynucleotide encoding artificial human antibody VL chain
gaaatagtgatgacgcagtctccagccaccctgtctgtgtctccaggggaaagggccaccctctcctgcagggccagtcagagtgttgacggcaacttagcctggtaccaacagaaacctggccaggctcccaggctcctcatctttgacgcatctaccagggccactactatcccagtcaggttcagtggcagtgggtctgggacagagttcactctcaccatcagcagcctgcagtctgaagattttgcagtttattactgtcagcagtatagtaaatggcccatcaccttcggccaagggacacgactggagattaaacgaactgtggctgcaccatctgtcttcatcttcccgccatctgatgagcagttgaaatctggaactgcctctgttgtgtgcctgctgaataacttctatcccagagaggccaaagtacagtggaaggtggataacgccctccaatcgggtaactcccaggagagtgtcacagagcaggacagcaaggacagcacctacagcctcagcagcaccctgacgctgagcaaagcagactacgagaaacacaaactctacgcctgcgaagtcacccatcagggcctgagctcgcccgtcacaaagagcttcaacaggggagagtgt

SEQ ID NO: 2520 - DNA, 644 bp, Artificial Sequence
  Synthetic polynucleotide encoding artificial human antibody VL chain
gtgacatccagatgacccagtctccatcctccctgtctgcatctctaggagacagaatcaccatcacttgccgggcaactcagagcattagcaactatttaaattggtatcaacaaaaatcagggaaagtccctgaacttctgatttatgctgcatcccatttgcaaagtggggtcccatcaaggttcagtggcactggatctgggacagacttcagtctcacaatcagcggtctgcagcctgaagattttgcaacttactactgtcaacagacttacactacccctaggacgttcggccgagggaccacggtggagatcagacgaactgtggctgcaccatctgtcttcatcttcccgccatctgatgagcagttgaaatctggaactgcctctgttgtgtgcctgctgaataacttctatcccagagaggccaaagtacagtggaaggtggataacgccctccaatcgggtaactcccaggagagtgtcacagagcaggacagcaaggacagcacctacagcctcagcagcaccctgacgctgagcaaagcagactacgagaaacacaaagtctacgcctgcgaagtcacccatcagggcctgagctcgcccgtcacaaagagcttcaacaggggagagtgt

SEQ ID NO: 2521 - DNA, 651 bp, Artificial Sequence
  Synthetic polynucleotide encoding artificial human antibody VL chain
ccgtctgtgctgacgcagccgccctcagtgtctggggccccaggacagagggtcaccatctcctgcactgggagcagctccaacatcggggcaggttatgatgtacactggtaccagcagcttccaggaacagcccccaaactcctcatctatggtaacatcaatcggccctcaggggtccctgaccgattctctggctccaagtctggcccctcagcctccctgaccatcactgggctccaggctgacgatgaggctgattattactgccagtcctatgacagccgcctgagtggtgtggtattcggcggggggaccaagctgaccgtcctaggtcagcccaaggctgccccctcggtcactctgttcccgccctcctctgaggagcttcaagccaacaaggccacactggtgtgtctcataagtgacttctacccgggagccgtgacagtggcctggaaggcagatagcagccccgtcaaggcgggagtggagaccaccacaccctccaaacaaagcaacaacaagtacgcggccagcagctatctgagcctgacgcctgagcagtggaagtcccacagaagctacagctgccaggtcacgcatgaagggagcaccgtggagaagacagtggcccctacagaatgttca

SEQ ID NO: 2522 - DNA, 642 bp, Artificial Sequence
  Synthetic polynucleotide encoding artificial human antibody VL chain
gaaatagtgatgacgcagtctccagccaccctgtctgtgtctccaggggagagagccaccctctcctgcagggccagtcagagtgtgagcaccaacttagcctggtaccagcagagacctggccaggctcccaggctcttcatctttggtgcatccaccagggccactggtatcccagccaggttcagtggcagtgggtctgggacagagttcactctcaccatcagcagcccgcagcctgaagactctgcagtttattactgtcagcagtatactaccaggcctctcactttcggcggagggaccaaggtggagatcaaacgaactgtggctgcaccatctgtcttcatcttcccgccatctgatgagcagttgaaatctggaactgcctctgttgtgtgcctgctgaataacttctatcccagagaggccaaagtacagtggaaggtggataacgccctccaatcgggtaactcccaggagagtgtcacagagcaggacagcaaggacagcacctacagcctcagcagcaccctgacgctgagcaaagcagactacgagaaacacaaagtctacgcctgcgaagtcacccatcagggcctgagctcgcccgtcacaaagagcttcaacaggggagagtgt

SEQ ID NO: 2523 - DNA, 644 bp, Artificial Sequence
  Synthetic polynucleotide encoding artificial human antibody VL chain
gcgaaattgtgttgacacagtctccagccaccttgtctttgtctccaggggaaggagccaccctctcctgcagggccagtcagagtgtgagtggctacttagcctggtaccaacagaaacctggccaggctcccaggctcctcatctatgacgcatccaacagggccactggcatccctgccaggttcagtggcagtgggtctgggacagacttcactctcaccatcagcagcctagagcctgaagattttgcagtttattactgtcaacagcggagcaagtggcctctcactttcggcggagggacccaggtggagatcaaacgaactgtggctgcaccatctgtcttcatcttcccgccatctgatgagcagttgaaatctggaactgcctctgttgtgtgcctgctgaataacttctatcccagagaggccaaagtacagtggaaggtggataacgccctccaatcgggtaactcccaggagagtgtcacagagcaggacagcaaggacagcacctacagcctcagcagcaccctgacgctgagcaaagcagactacgagaaacacaaactctacgcctgcgaagtcacccatcagggcctgagctcgcccgtcacaaagagcttcaacaggggagagtgt

SEQ ID NO: 2524 - DNA, 651 bp, Artificial Sequence
  Synthetic polynucleotide encoding artificial human antibody VL chain
cagtctgtggtgactcaaccaccctcagcgtctgggccccccgggcagacagtcaccatctcttgttctggaggcaggtccaacgtcgccagtcatgctgtacattggtaccagcatctcccgggaacggcccccaaactcctcatctataatgatcatcagcggccctccggggtccctgaccgattctctggctccaagtctggcccttcagcctccctggccatcagtggcctccggtccgaagatgaggctgattattactgtgcaacatgggatgacagcctgggtggccgtgtggttttcggcggagggaccaaattgaccgtcctaggtcagcccaaggctgccccctcggtcactctgttcccgccctcctctgaggagcttcaagccaacaaggccacactggtgtgtctcataagtgacttctacccgggagccgtgacagtggcctggaaggcagatagcagccccgtcaaggcgggagtggagaccaccacaccctccaaacaaagcaacaacaagtacgcggccagcagctatctgagcctgacgcctgagcagtggaagtcccacagaagctacagctgccaggtcacgcatgaagggagcaccgtggagaagacagtggcccctacagaatgttca

SEQ ID NO: 2525 - DNA, 660 bp, Artificial Sequence
  Synthetic polynucleotide encoding artificial human antibody VL chain
gatattgtgatgacccagactccactctccatgcccgtcacccctggagagccggcctccatctcctgcaggtctagtcagagcctcttggacagtgatgatggaaaaacctatttggactggtacctgcagaagccagggcagtctccacagctcctgatctatacggtttcctatcgggcctctggagtcccagacaggttcagtggcagtgggtcaggcactgatttcacactgaaaatcagcagggtggaggctgaggatgttggagtttattactgcatgcaacgtatagagtttcctttcactttcggccctgggaccaaagtggatatcaaacgaactgtggctgcaccatctgtcttcatcttcccgccatctgatgagcagttgaaatctggaactgcctctgttgtgtgcctgctgaataacttctatcccagagaggccaaagtacagtggaaggtggataacgccctccaatcgggtaactcccaggagagtgtcacagagcaggacagcaaggacagcacctacagcctcagcagcaccctgacgctgagcaaagcagactacgagaaacacaaagtctacgcctgcgaagtcacccatcagggcctgagctcgcccgtcacaaagagcttcaacaggggagagtgt

SEQ ID NO: 2526 - DNA, 319 bp, Artificial Sequence
  Synthetic polynucleotide encoding artificial human antibody VL chain
tcctatgagctgactcagccaccctcagtgtccgtgtccccaggacagacagccagcatcacctgctctggagataaattgggggataaatatgcttgctggtatcagcagaagccaggccagtcccctgtgctggtcatctatcaagatagcaagcggccctcagggatccctgagcgattctctggctccaactctgggaacacagccactctgaccatcagcgggacccaggctatggatgaggctgactattactgtcaggcgtgggacagcagcactgcggtattcggcggagggaccaagctgaccgtcctag

SEQ ID NO: 2527 - DNA, 636 bp, Artificial Sequence
  Synthetic polynucleotide encoding artificial human antibody VL chain
ccctatgaactgactcagccaccctcagtgtccgtgtccccaggacagacagccaacatcacctgttctggagataaattgggggatatatgtgtttgctggtatcagcagaagccaggccagtcccctgtgttggtcatctatcaacataacaagcggccctcagggatccctgagcgattctctggctccaactctggcaacacagccacgctgaccatcagcgcgacccaggctacggatgaggctatctattactgtcagtcgtgggacagtagttctgtgctattcggcggagggaccaagctgaccgtcctcggtcagcccaaggctgccccctcggtcactctgttcccgccctcctctgaggagcttcaagccaacaaggccacactggtgtgtctcataagtgacttctacccgggagccgtgacagtggcctggaaggcagatagcagccccgtcaaggcgggagtggagaccaccacaccctccaaacaaagcaacaacaagtacgcggccagcagctatctgagcctgacgcctgagcagtggaagtcccacagaagctacagctgccaggtcacgcatgaagggagcaccgtggagaagacagtggcccctacagaatgttca

SEQ ID NO: 2528 - DNA, 660 bp, Artificial Sequence
  Synthetic polynucleotide encoding artificial human antibody VL chain
ggcatcgtgatgacccagtctccagactccctgggtgtgtctctgggcgagagggccaccatcaactgcaagtccagccagagtcttttctatagctccaacaataagaactacttagcttggtaccagcagaaaccagggcagcctcctaaactgctcatttactgggcatctacccgggaatccggggtccctgaccgattcagtggcagcgggtctgggacagatttcactctcaccatcagcagcctgcaggctgaagatgtggcagtttattactgtcagcaatattatggtcgtctattcactttcggccctgggaccaaagtggatatcagacgaactgtggctgcaccatctgtcttcatcttcccgccatctgatgagcagttgaaatctggaactgcctctgttgtgtgcctgctgaataacttctatcccagagaggccaaagtacagtggaaggtggataacgccctccaatcgggtaactcccaggagagtgtcacagagcaggacagcaaggacagcacctacagcctcagcagcaccctgacgctgagcaaagcagactacgagaaacacaaagtctacgcctgcgaagtcacccatcagggcctgagctcgcccgtcacaaagagcttcaacaggggagagtgt

SEQ ID NO: 2529 - DNA, 648 bp, Artificial Sequence
  Synthetic polynucleotide encoding artificial human antibody VL chain
caaattgtgttgacacagtctccagccaccctgtctttgtctccaggggaaagagccaccctctcctgcagggccagtcagagtgttagcagctacttagcctggtaccaacagaaacctggccaggctcccaggctcctcatctatgatgcatccaacagggccactggcatcccagccaggttcagtggcggtgggtctgagacagacttcactctcaccatcagcagcctagagcctgaagattttgcagtttattactgtcagcagcgtagcaactggcctccgaggctccctttcggcggagggaccaaggtggagatcaaacgaactgtggctgcaccatctgtcttcatcttcccgccatctgatgagcagttgaaatctggaactgcctctgttgtgtgcctgctgaataacttctatcccagagaggccaaagtacagtggaaggtggataacgccctccaatcgggtaactcccaggagagtgtcacagagcaggacagcaaggacagcacctacagcctcagcagcaccctgacgctgagcaaagcagactacgagaaacacaaagtctacgcctgcgaagtcacccatcagggcctgagctcgcccgtcacaaagagcttcaacaggggagagtgt

SEQ ID NO: 2530 - DNA, 645 bp, Artificial Sequence
  Synthetic polynucleotide encoding artificial human antibody VL chain
caaattgtgttgacacagtctccagccaccctgtctttgtctccaggggaaagagccaccctctcctgcagggccagtcagagtgttagcaactatttagcctggtaccaacagaaacctggccaggctcccaggctcctcatctatgatgcatccaacagggccactggcatcccagccaggttcagtggcagtgggtctgggacagacttcactctcaccatcagcagcctagagcctgaagattttgcagtttattactgtcagcagcgtagcaactggcctccgtacacttttggccaggggaccaagctggacatcaaacgaactgtggctgcaccatctgtcttcatcttcccgccatctgatgagcagttgaaatctggaactgcctctgttgtgtgcctgctgaataacttctatcccagagaggccaaagtacagtggaaggtggataacgccctccaatcgggtaactcccaggagagtgtcacagagcaggacagcaaggacagcacctacagcctcagcagcaccctgacgctgagcaaagcagactacgagaaacacaaagtctacgcctgcgaagtcacccatcagggcctgagctcgcccgtcacaaagagcttcaacaggggagagtgt

SEQ ID NO: 2531 - DNA, 657 bp, Artificial Sequence
  Synthetic polynucleotide encoding artificial human antibody VL chain
gatattgtgatgactcagtctccactctccctgcccgtcacccctggagagccggcctccatctcctgcaggtctagtcagagcctcctacagagtaatggaaacaactatttggcttggtacctgcagaagccagggcagtctccacaactcctgatctatttgggttctaatcgggcctccggggtccctgacaggttcagtggcagtggatcaggcacagattttacactgaaaatcagcaaattggcggctgaggatgttggggtttattactgcatgcaagctctacaaactccgtacacttttggccaggggaccaagctggacatcaaacgaactgtggctgcaccatctgtcttcatcttcccgccatctgatgagcagttgaaatctggaactgcctctgttgtgtgcctgctgaataacttctatcccagagaggccaaagtacagtggaaggtggataacgccctccaatcgggtaactcccaggagagtgtcacagagcaggacagcaaggacagcacctacagcctcagcagcaccctgacgctgagcaaagcagactacgagaaacacaaagtctacgcctgcgaagtcacccatcagggcctgagctcgcccgtcacaaagagcttcaacaggggagagtgt

SEQ ID NO: 2532 - DNA, 642 bp, Artificial Sequence
  Synthetic polynucleotide encoding artificial human antibody VL chain
gacatccagatgacccagtctccttccaccctgtctgcatctgtaggagacagagtcaccatcacttgccgggccagtcagagtattagtggctggttggcctggtatcagcagaagccagggaaagcccctcaactcctgatctatttggtgtctagtttagaaagtggggtcccgtcaaggtttagcggcagtggatctgggacagaattcactctcaccatcagcagcctgcagcctgatgattttgcaacttattactgccaacactatgatagttatattggaacgttcggccaagggaccaaggtggaaatcaaacgaactgtggctgcaccatctgtcttcatcttcccgccatctgatgagcagttgaaatctggaactgcctctgttgtgtgcctgctgaataacttctatcccagagaggccaaagtacagtggaaggtggataacgccctccaatcgggtaactcccaggagagtgtcacagagcaggacagcaaggacagcacctacagcctcagcagcaccctgacgctgagcaaagcagactacgagaaacacaaactctacgcctgcgaagtcacccatcagggcctgagctcgcccgtcacaaagagcttcaacaggggagagtgt

SEQ ID NO: 2533 - DNA, 648 bp, Artificial Sequence
  Synthetic polynucleotide encoding artificial human antibody VL chain
cagtctgtgttgacgcagccgccctcagtgtctgcggccccaggacagaaggtcaccatctcctgctctggaggcagctccaacattggaaataattatgtatcctggtaccagcagctcccaggaacagcccccaaactcatcatttatgacaatgataaacgacccgcagggattcctgaccgattctctggctccaagtctggttcgtcagccaccctgggcatcaccggactccagaatggggacgaggccgagtattattgcggaacatgggatagcagtttgggtggcggagtgttcggcggagggaccaaggtgaccgtcctaggtcagcccaaggctgccccctcggtcactctgttcccgccctcctctgaggagcttcaagccaacaaggccacactggtgtgtctcataagtgacttctacccgggagccgtgacagtggcctggaaggcagatagcagccccgtcaaggcgggagtggagaccaccacaccctccaaacaaagcaacaacaagtacgcggccagcagctatctgagcctgacgcctgagcagtggaagtcccacagaagctacagctgccaggtcacgcatgaagggagcaccgtggagaagacagtggcccctacggaatgttca

SEQ ID NO: 2534 - DNA, 645 bp, Artificial Sequence; identical to SEQ ID NO: 2530
  Synthetic polynucleotide encoding artificial human antibody VL chain

SEQ ID NO: 2535 - DNA, 337 bp, Artificial Sequence
  Synthetic polynucleotide encoding artificial human antibody VL chain
ggaattgtgatgactcagtctccactctccctgcccgtcacccctggagagacggcctccatctcctgtaggtctagtcagagcctccttcgtcgtgatggaaacaactatttggagtggtacctgcagaaaccagggcagcctccacacctcctgatctatttgggttctattcgggcctccagagtccctgacaggttcagtggcactgggtcagggacagacttcacactgataatcagcagagtggaggctgacgatgttggcgtttattactgcatggaagctgaacaaactccggggacttttggccaggggaccaagctggagatcaaac

SEQ ID NO: 2536 - DNA, 648 bp, Artificial Sequence
  Synthetic polynucleotide encoding artificial human antibody VL chain
cagtctgccctgactcagcctgcctccgtgtctgggtctcctggacagtcgatcaccatctcctgcactggaaccagcagtgacgttggtggttttaactatgtctcctggtaccaacaacacccaggcaaagcccccaaactcctgatttatgatgtcagtgagcggccctcaggggtttctagtcgcttctctggctccaagtctggcaacacggcctccctgaccatctctgggctccaggctgaggacgaggctgattattactgcagctcatatacaagcagcaccactgtgcttttcggcggagggaccaagctgaccgtcctaggtcagcccaaggctgccccctcggtcactctgttcccgccctcctctgaggagcttcaagccaacaaggccacactggtgtgtctcataagtgacttctacccgggagccgtgacagtggcctggaaggcagatagcagccccgtcaaggcgggagtggagaccaccacaccctccaaacaaagcaacaacaagtacgcggccagcagctacctgagcctgacgcctgagcagtggaagtcccacagaagctacagctgccaggtcacgcatgaagggagcaccgtggagaagacagtggcccctacagaatgttca

SEQ ID NO: 2537 - DNA, 660 bp, Artificial Sequence
  Synthetic polynucleotide encoding artificial human antibody VL chain
ggggttgtgatgactcagtctccactctccctgcccgtcacccttggacagccggcctccatctcctgcaggtctagtcaaagcctcgtatacagtgatggaaacacctacttgaattggtttcagcagaggccaggccaatctccaaggcgcctaatttataaggtttctaaccgggactctggggtcccagacagattcagcggcagtgggtcaggcactgatttcacactgaaaatcagcagggtggaggctgaggatgttggggtttattactgcatgcaaggtacacactggcctccgatcaccttcggccaagggacacgactggagattaaacgaactgtggctgcaccatctgtcttcatcttcccgccatctgatgagcagttgaaatctggaactgcctctgttgtgtgcctgctgaataacttctatcccagagaggccaaagtacagtggaaggtggataacgccctccaatcgggtaactcccaggagagtgtcacagagcaggacagcaaggacagcacctacagcctcagcagcaccctgacgctgagcaaagcagactacgagaaacacaaagtctacgcctgcgaagtcacccatcagggcctgagctcgcccgtcacaaagagcttcaacaggggagagtgt

SEQ ID NO: 2538 - DNA, 642 bp, Artificial Sequence
  Synthetic polynucleotide encoding artificial human antibody VL chain
gacatccagatgacccagtctccatcctccctgtctgcatctgtaggagacagagtcaccatcacttgccgggcaagtcagagtattagcagctatttaaattggtatcagcagaaaccagggaaagcccctaagctcctgatctatgctgcatccagtttgcaaagtggggtcccatcaaggttcagtggcagtggatctgggacagatttcactctcgccatcagcagtctgcaacctgaagattttgcaacttactactgtcaccagacttacagtacccggctcactttcggcggagggaccgaggtggagatcaaacgaactgtggctgcaccatctgtcttcatcttcccgccatctgatgagcagttgaaatctggaactgcctctgttgtgtgcctgctgaataacttctatcccagagaggccaaagtacagtggaaggtggataacgccctccaatcgggtaactcccaggagagtgtcacagagcaggacagcaaggacagcacctacagcctcagcagcaccctgacgctgagcaaagcagactacgagaaacacaaagtctacgcctgcgaagtcacccatcagggcctgagctcgcccgtcacaaagagcttcaacaggggagagtgt

SEQ ID NO: 2539 - DNA, 644 bp, Artificial Sequence
  Synthetic polynucleotide encoding artificial human antibody VL chain
gtgacatccagatgacccagtctccatcctccctgtctgcatctgtaggagacagagtcaccatcacttgccaggcgagtcaggacattagcaactatttaaattggtatcagcagaaaccagggaaagcccctaagctcctgatctacgatgcatccaatttggaaacaggggtcccatcaaggttcagtggcagtggatctgggacagatttcactctcaccatcagcagcctgcagcctgaagattttgcaacatattactgtcaacagtatgataatctcccgctcactttcggcggagggaccaaggtggagatcaaacgaactgtggctgcaccatctgtcttcatcttcccgccatctgatgagcagttgaaatctggaactgcctctgttgtgtgcctgctgaataacttctatcccagagaggccaaagtacagtggaaggtggataacgccctccaatcgggtaactcccaggagagtgtcacagagcaggacagcaaggacagcacctacagcctcagcagcaccctgacgctgagcaaagcagactacgagaaacacaaagtctacgcctgcgaagtcacccatcagggcctgagctcgcccgtcacaaagagcttcaacaggggagagtgt

SEQ ID NO: 2540 - DNA, 642 bp, Artificial Sequence
  Synthetic polynucleotide encoding artificial human antibody VL chain
tcctatgtgctgactcagccaccctcggtgtcagtggccccaggacagacggccaggattacctgtgggggaaacaacattggaagtaaaagtgtgcactggtaccagcagaagccaggccaggcccctgtgctggtcgtctatgatgatagcgaccggccctcagggatccctgagcgattctctggctccaactctgggaacacggccaccctgaccatcagcagggtcgaagccggggatgaggccgactattactgtcaggtgtgggatagcagtagtgatccttgggtgttcggcggagggaccaagctgaccgtcctaggtcagcccaaggctgccccctcggtcactctgttcccgccctcctctgaggagcttcaagccaacaaggccacactggtgtgtctcataagtgacttctacccgggagccgtgacagtggcctggaaggcagatagcagccccgtcaaggcgggagtggagaccaccacaccctccaaacaaagcaacaacaagtacgcggccagcagctacctgagcctgacgcctgagcagtggaagtcccacaaaagctacagctgccaggtcacgcatgaagggagcaccgtggagaagacagtggcccctacagaatgttca

SEQ ID NO: 2541 - DNA, 647 bp, Artificial Sequence
  Synthetic polynucleotide encoding artificial human antibody VL chain
gtgacatccagttgacccagtctccatccttcctgtctgcatctgtaggagacagagtcaccatcacttgccgggccagtcaggtcattagcgattatgtagcctggtatcagcaaaaaccagggaaagcccctaagctcctgatctatgctgcatccactttgcaaagtggggtcccatctaggttcagcggcagtggatctgggacagaattcactctcacaatcagcagcctgcagtctgaagattttgcaacttattactgtcaacaactgaatagttaccctccggtcaccttcggccaagggacacgactggacattaaacgaactgtggctgcaccatctgtcttcatcttcccgccatctgatgagcagttgaaatctggaactgcctctgttgtgtgcctgctgaataacttctatcccagagaggccaaagtacagtggaaggtggataacgccctccaatcgggtaactcccaggagagtgtcacagagcaggacagcaaggacagcacctacagcctcagcagcaccctgacgctgagcaaagcagactacgagaaacacaaagtctacgcctgcgaagtcacccatcagggcctgagctcgcccgtcacaaagagcttcaacaggggagagtgt

SEQ ID NO: 2542 - DNA, 644 bp, Artificial Sequence
  Synthetic polynucleotide encoding artificial human antibody VL chain
gtgacatccagatgacccagtctccatcctccctgtctgcatctgtaggagacagagtcaccatcacttgccgggcaagtcagagcattagcacttatttaaattggtatcagcagaaaccagggaaagcccctaagctcctgatctatgttgcatccagtttgcaaagtggggtcccatcaaggttcagtggcagtggatctgggacagatttcactctcacaatcagcggtctgcaacctgaagattttgcaacttactactgtcaacagagttacagtaccccgtacacttttggccaggggaccaagctggagatcaaacgaactgtggctgcaccatctgtcttcatcttcccgccatctgatgagcagttgaaatctggaactgcctctgttgtgtgcctgctgaataacttctatcccagagaggccaaagtacagtggaaggtggataacgccctccaatcgggtaactcccaggagagtgtcacagagcaggacagcaaggacagcacctacagcctcagcagcaccctgacgctgagcaaagcagactacgagaaacacaaagtctacgcctgcgaagtcacccatcagggcctgagctcgcccgtcacaaagagcttcaacaggggagagtgt

SEQ ID NO: 2543 - DNA, 647 bp, Artificial Sequence
  Synthetic polynucleotide encoding artificial human antibody VL chain
gtgacatccagatgacccagtctccttccaccctgtctgcatctgtaggagacagagtcaccatcacttgccgggccagtcagagaattagtaactggttggcctggtatcagcagacaccagggaaagcccctaagctcctgatctataaggcgtccagtttagaaagtggggtcccatcaaggttcagcggcagtggatctgggacagaattcactctcaccatcagcagcctgcagcctgatgattttgcaacttattactgccaacagtatagtagttcttctccaagaacgttcggccaagggaccaaggtggaaatcaaacgaactgtggctgcaccatctgtcttcatcttcccgccatctgatgagcagttgaaatctggaactgcctctgttgtgtgcctgctgaataacttctatcccagagaggccaaagtacagtggaaggtggataacgccctccaatcgggtaactcccaggagagtgtcacagagcaggacagcaaggacagcacctacagcctcagcagcaccctgacgctgagcaaagcagactacgagaaacacaaagtctacgcctgcgaagtcacccatcagggcctgagctcgcccgtcacaaagagcttcaacaggggagagtgt

SEQ ID NO: 2544 - DNA, 337 bp, Artificial Sequence
  Synthetic polynucleotide encoding artificial human antibody VL chain
gatattttgatgacccagactccactctctctgtccgtcacccctggacagccggcctccatctcctgcaagtctagtcagagcctcctgaatcctgatggaaagacctatttgtattggtacctgcagaagtcaggccagcctccacagctcctgatctatgaactttccaaccgcttctctggagtgccagataggttcagtggcagcgggtcagggacagatttcacactgaagatcagccgggtggaggctgaggatattggagtttatttctgcatgcaaagtttacaacttccgattaccttcggccaagggacacgactggagattaaac

SEQ ID NO: 2545 - DNA, 647 bp, Artificial Sequence
  Synthetic polynucleotide encoding artificial human antibody VL chain
gtgacatccagatgacccagtctccatcctccctgtctgcatctgtaggagacagagtcaccatcacttgccgggcaagtcagagcattagcggctatttaaattggtatcagcagaaaccagggaaagcccctaagctcctgatctatgctgcatccagtttgcaaagtggggtcccatcaaggttcagtggcagtggatctgggacagatttcactctcaccatcagcagtctgcaacctgaagattttgcaacttactactgtcaacagagttacagtacccgtttactcactttcggccctgggaccaaagtggatatcaaacgaactgtggctgcaccatctgtcttcatcttcccgccatctgatgagcagttgaaatctggaactgcctctgttgtgtgcctgctgaataacttctatcccagagaggccaaagtacagtggaaggtggataacgccctccaatcgggtaactcccaggagagtgtcacagagcaggacagcaaggacagcacctacagcctcagcagcaccctgacgctgagcaaagcagactacgagaaacacaaagtctacgcctgcgaagtcacccatcagggcctgagctcgcccgtcacaaagagcttcaacaggggagagtgt

SEQ ID NO: 2546 - DNA, 651 bp, Artificial Sequence
  Synthetic polynucleotide encoding artificial human antibody VL chain
cagtctgtgctgacgcagccgccctcagtgtctggggccccagggcagagggtcaccatctcctgcactgggagtagctccaacgtcggggcagattatgatgtgcactggtaccagcagcttccaggaacagcccccaaactcctcatctatggtaacagaaatcggccctcaggggtccctgaccgattctctggctccaagtctggcacctcagcctccctggccatcactgggctccaggctgaggatgaggctgattattactgccagtcctttgacagcagcctgagaggttatgtcttcggaactgggaccaaggtcaccgtcctaggtcagcccaaggccaaccccactgtcactctgttcccgccctcctctgaggagctccaagccaacaaggccacactagtgtgtctgatcagtgacttctacccgggagctgtgacagtggcctggaaggcagatggcagccccgtcaaggcgggagtggagaccaccaaaccctccaaacagagcaacaacaagtacgcggccagcagctacctgagcctgacgcccgagcagtggaagtcccacagaagctacagctgccaggtcacgcatgaagggagcaccgtggagaagacagtggcccctacagaatgttca

SEQ ID NO: 2547 - DNA, 648 bp, Artificial Sequence
  Synthetic polynucleotide encoding artificial human antibody VL chain
gaaattgtattgacccagtctccagacaccctgtctttgtctccaggggaaagagccaccctctcctgcagggccagtcagagtgttagcagctccttagcctggtaccaacagaaacctggccaggctccccgactcctcatctattatgcatccaacagggccactgacatcccagccaggttcagtggcagtgggtctgggacagacttcactctcaccatcagcagcctagagcctgaagattttgcactttattactgtcagcaccgtatcacctggcctcccctgatcaccttcggccaagggacacgactggagattaaacgaactgtggctgcaccatctgtcttcatcttcccgccatctgatgagcagttgaaatctggaactgcctctgttgtgtgcctgctgaataacttctatcccagagaggccaaagtacagtggaaggtggataacgccctccaatcgggtaactcccaggagagtgtcacagagcaggacagcaaggacagcacctacagcctcagcagcaccctgacgctgagcaaagcagactacgagaaacacaaagtctacgcctgcgaagtcacccatcagggcctgagctcgcccgtcacaaagagcttcaacaggggagagtgt

SEQ ID NO: 2548 - DNA, 645 bp, Artificial Sequence
  Synthetic polynucleotide encoding artificial human antibody VL chain
gaaattgtgttgacgcagtctccaggcaccctgtctttgtctccaggggaaagagccaccctctcctgcagggccagtcagagttttgacggcaagtccttagcctggtaccagcagaaacctggccagactccccgcctcctcgtctatggcgcgtccagcagggccactggcatcccagacaggttcggtggcagtgggtctgggacagacttcactctcaccatcagcagactggagtctgaagattttgcagtgtatttctgtcagcaatatgcttatgtaccgatcaccttcggccaagggacacgactggagcgtaaacgaactgtggctgcaccatctgtcttcatcttcccgccatctgatgagcagttgaaatctggaactgcctctgttgtgtgcctgctgaataacttctatcccagagaggccaaagtacagtggaaggtggataacgccctccaatcgggtaactcccaggagagtgtcacagagcaggacagcaaggacagcacctacagcctcagcagcaccctgacgctgagcaaagcagactacgagaaacacaaagtctacgcctgcgaagtcacccatcagggcctgagctcgcccgtcacaaagagcttcaacaggggagagtgt

SEQ ID NO: 2549 - DNA, 660 bp, Artificial Sequence
  Synthetic polynucleotide encoding artificial human antibody VL chain
ggcatcgtgatgacccagtctccagactccctggctgtgtctctgggcgagagggccaccatcaactgcaagtccagccagagtattttatacagctccaacaataaggactccttagcttggtaccagcagaaaccaggacagcctcctaaacttctcatttcctcggcatctacccggcaatccggggtccctgaccgattcagtggcagcgggtctgggacagatttcaccctcaccatcagcagcctacaggctgaagatgtggcagtttattactgtcagcaatattatagtattcccctcactttcggccctgggaccaaagtggatatcaaacgaactgtggctgcaccatctgtcttcatcttcccgccatctgatgagcagttgaaatctggaactgcctctgttgtgtgcctgctgaataacttctatcccagagaggccaaagtacagtggaaggtggataacgccctccaatcgggtaactcccaggagagtgtcacagagcaggacagcaaggacagcacctacagcctcagcagcaccctgacgctgagcaaagcagactacgagaaacacaaagtctacgcctgcgaagtcacccatcagggcctgagctcgcccgtcacaaagagcttcaacaggggagagtgg

SEQ ID NO: 2550 - DNA, 325 bp, Artificial Sequence
  Synthetic polynucleotide encoding artificial human antibody VL chain
gaaattgtgttgacgcagtctccaggcaccctgtctttgtctctaggggaaagagccaccctctcctgcagggccagtcagagtgttagcggcagccacttagcctggtatcagcagaaacctggccaggctcccaggctcctcatctatgatgcatccagcagggccactggcatcccagacaggttcagtggcagtgggtctgggacagagttcactctcaccatcagcagactggagcctgaagattttgcagtgtattactgtcagcagtatggtagctcacccctgtggttcggccaagggaccaaggtggaaatcaaac

SEQ ID NO: 2551 - DNA, 648 bp, Artificial Sequence
  Synthetic polynucleotide encoding artificial human antibody VL chain
cagtctgccctgactcagcctgcctccgtgtctgggtctcctggacagtcgatcaccatctcctgcactggaaccagcagtgacgttggtggttataactatgtctcctggtaccaacaacacccaggcaaagcccccaaactcatgatttatgatgtcagtaatcggccctcaggggtttctaatcgcttctctggctccaagtctggcaacacggcctccctgaccatctctgggctccaggctgaggacgaggctgattattactgcagctcatatacaagcagcagcactcaagtcttcggaactgggaccaaggtcaccgtcctaggtcagcccaaggccaaccccactgtcactctgttcccgccctcctctgaggagctccaagccaacaaggccacactagtgtgtctgatcagtgacttctacccgggagctgtgacagtggcctggaaggcagatggcagccccgtcaaggcgggagtggagaccaccaaaccctccaaacagagcaacaacaagtacgcggccagcagctacctgagcctgacgcccgagcagtggaagtcccacagaagctacagctgccaggtcacgcatgaagggagcaccgtggagaagacagtggcccctacagaatgttca

SEQ ID NO: 2552 - DNA, 642 bp, Artificial Sequence
  Synthetic polynucleotide encoding artificial human antibody VL chain
ccctatgagctgacacagccaccctcggtgtcagtgtccccaggacaaacggccaggatcacctgctctggagatgcattgccaaaaaaatatgcttattggtaccagcagaagtcaggccaggcccctgtgctggtcatctatgaggacagcaaacgaccctccgggatccctgagagattctctggctccagctcagggacaatggccaccttgactatcagtggggcccaggtggaggatgaagctgactactactgttactcaacagacagcagtggtaatcatagggtgttcggcggagggaccaagctgaccgtcctaggtcagcccaaggctgccccctcggtcactctgttcccaccctcctctgaggagcttcaagccaacaaggccacactggtgtgtctcataagtgacttctacccgggagccgtgacagtggcctggaaggcagatagcagccccgtcaaggcgggagtggagaccaccacaccctccaaacaaagcaacaacaagtacgcggccagcagctacctgagcctgacgcctgagcagtggaagtcccacaaaagctacagctgccaggtcacgcatgaagggagcaccgtggagaagacagtggcccctacagaatgttca

SEQ ID NO: 2553 - DNA, 645 bp, Artificial Sequence
  Synthetic polynucleotide encoding artificial human antibody VL chain
gaaatagtgatgacgcagtctccagccaccctgtctgtgtctccaggggaaacagccaccctctcctgcagggccagtcagagtgttagcagcaacttagcctggtaccagcagaaacctggccaggctcccaggctcctcatgtatggtgcatccaccagggccactagtgtcccagccaggttcagtggcagtgcgtctgggacagatttcactctcaccatcagcagcctgcagtctgaagattttgcactttattactgtcagcagtataataactggcctcagtacacttttggccaggggaccaagctggagatcaaacgaactgtggctgcaccatctgtcttcatcttcccgccatctgatgagcagttgaaatctggaactgcctctgttgtgtgcctgctgaataacttctatcccagagaggccaaagtacagtggaaggtggataacgccctccaatcgggtaactcccaggagagtgtcacagagcaggacagcaaggacagcacctacagcctcagcagcaccctgacgctgagcaaagcagactacgagaaacacaaagtctacgcctgcgaagtcacccatcagggcctgagctcgcccgtcacaaagagcttcaacaggggagagtgg

SEQ ID NO: 2554 - DNA, 651 bp, Artificial Sequence
  Synthetic polynucleotide encoding artificial human antibody VL chain
gaaattgtgttgacgcagtctccaggcaccctgtctttgtctccaggggagagagccaccctctcctgcagggccagtcagagtgttagcagcagctacttagtctggtaccaacaaaaagctggccaggctcccaggctcctaatctatggtgcatccagcagggccactggcatctcagacaggttcagtggcagtgggtctgggacagacttcactctcaccatcagcagactggagcctgaagattttgcagtgtattactgtcagcactttcgtagctcacctcccacgtacacttttggccaggggaccaagctggagatcaaacgaactgtggctgcaccatctgtcttcatcttcccgccatctgatgagcagttgaaatctggaactgcctctgttgtgtgcctgctgaataacttctatcccagagaggccaaagtacagtggaaggtggataacgccctccaatcgggtaactcccaggagagtgtcacagagcaggacagcaaggacagcacctacagcctcagcagcaccctgacgctgagcaaagcagactacgagaaacacaaagtctacgcctgcgaagtcacccatcagggcctgagctcgcccgtcacaaagagcttcaacaggggagagtgt

SEQ ID NO: 2555 - DNA, 648 bp, Artificial Sequence
  Synthetic polynucleotide encoding artificial human antibody VL chain
cagtctgccctgactcagcctgcctccgtgtctgggtctcctggacagtcgatcaccatctcctgcactggaaccagcagtgacgttggtctttataactttgtctcctggtatcaacaacacccaggcaaagcccccaaactcatgatttttgatgtcaataatcggccctcaggggtttctaatcgcttctctggctccaagtctgacaacacggcctccctgaccatctctggcctccaggctgaggacgaggctgattattactgcagctcatattcaaggaccaccactctcgtattcggcggagggaccaaggtgaccgtcctaggtcagcccaaggctgccccctcggtcactctgttcccgccctcctctgaggagcttcaagccaacaaggccacactggtgtgtctcataagtgacttctacccgggagccgtgacagtggcctggaaggcagatagcagccccatcaaggcgggagtggagaccaccacaccctccaaacaaagcaacaacaagtacgcggccagcagctatctgagcctgacgcctgagcagtggaagtcccacagaagctacagctgccaggtcacgcatgaagggagcaccgtggagaagacagtggcccctacagaatgttca

SEQ ID NO: 2556 - DNA, 654 bp, Artificial Sequence
  Synthetic polynucleotide encoding artificial human antibody VL chain
ccagctgtactgacgcagccgccctcagtttctggggccccagggcagagggtcaccatctcctgcactgggagcaactccaacatcggggcaggttattatgtacactggtaccagcaccgtccaggagcagcccccaaacgcctcatctatgcagacagcgatcgcccctcaggagtccctgaccgattctctggctccaggtctggcacctcagcctccctggccatcactgggctccaggctgaggatgaggctgattattactgccagtcctatgacagcggcctgagtgctccttgggtgttcggcggagggaccaagttgaccgtcctaggtcagcccaaggctgccccctcggtcactctgttcccgccctcctctgaggagcttcaagccaacaaggccacactggtgtgtctcataagtgacttctacccgggagccgtgacagtggcctggaaggcagatagcagccccgtcaaggcgggagtggagaccaccacaccctccaaacaaagcaacaacaagtacgcggccagcagctacctgagcctgacgcctgagcagtggaagtcccacaaaagctacagctgccaggtcacgcatgaagggagcaccgtggagaagacagtggcccctacagaatgttca

SEQ ID NO: 2557 - DNA, 645 bp, Artificial Sequence
  Synthetic polynucleotide encoding artificial human antibody VL chain
gaaattgtgctgacgcagtctccaggcaccctgtctttgtctccaggacaaagagccaccctctcctgtagggccagtcagagtgttaccagcagctacttagcctggtaccagcagaaacctggccaggctcccaggctcctcatctatgctgcatccagcagggccactggcaccccagacaggttcagtggcagtgggtctgggacagacttcactctcaccatcagcagactggagcctgaggattttgcagtgtattcctgtcagcaatatggtaactcacctcccactttcggcggagggaccaaggtggagatcaaacgaactgtggctgcaccatctgtcttcatcttcccgccatctgatgagcagttgaaatctggaactgcctctgttgtgtgcctgctgaataacttctatcccagagaggccaaagtacagtggaaggtggataacgccctccaatcgggtaactcccaggagagtgtcacagagcaggacagcaaggacagcacctacagcctcagcagcaccctgacgctgagcaaagcagactacgagaaacacaaagtctacgcctgcgaagtcacccatcagggcctgagctcgcccgtcacaaagagcttcaacaggggagagtgt

SEQ ID NO: 2558 - DNA, 331 bp, Artificial Sequence
  Synthetic polynucleotide encoding artificial human antibody VL chain
ccgtctgtgctgactcagccactctcagcgtctgggacccccgggcagagggtcaccatctcttgttctggaagcagctccaacatcggagataattttgtttattggtatcagcaattcccgggaacggcccccaaagtcctcatctttaaaaataatcagcggccctcaggggtccctgaccgattcttcggctccaagtctggcacctcagcctccctggccatcagtggactccggtccgaggatgaggctgagtattactgtgcaacctgggatgacgacctgagtggtccggtcttcggcggagggaccaaggtgaccgtcctag

SEQ ID NO: 2559 - DNA, 322 bp, Artificial Sequence
  Synthetic polynucleotide encoding artificial human antibody VL chain
gaaacgacactcatgcagtctccagcactcatatcagcgactccaggagacaaagtccacatctcctgcaaagccagccaagacattgacgatgatttgaattggtatcaacagaaaccaggagaagctcctattctcattattgaagaagcaactaatctcggtcctggattctcacctcgattcagtggcagcgggtatggaacagatttcaccctcacaatttatgacatagagtctggagatgctgcattttacttctgtctacaacatgatactttccctctgacgttcggccaagggaccaaagtggaaatcaaac

SEQ ID NO: 2560 - DNA, 644 bp, Artificial Sequence
  Synthetic polynucleotide encoding artificial human antibody VL chain
gtgacatccagatgacccagtctccttccaccctgtctgcatctgtaggagacaaagtcaccatcacttgccgggccagtcagagtgttggtagctggttggcctggtatcagcaaaaaccagggaaagcccctaagctcctgatctctgtggcgtctagtttagaaagtggggtcccatcaaggttcagcggcagtggatctgggacagaattcactctcaccgtcagcagcctgcagcctgatgattttgcaacttattactgtcaacagtataatagttattcgtggacgttcggccaagggaccaaggtggagctcaaacgaactgtggctgcaccatctgtcttcatcttcccgccatctgatgagcagttgaaatctggaactgcctctgttgtgtgcctgctgaataacttctatcccagagaggccaaagtacagtggaaggtggataacgccctccaatcgggtaactcccaggagagtgtcacagagcaggacagcaaggacagcacctacagcctcagcagcaccctgacgctgagcaaagcagactacgagaaacacaaagtctacgcctgcgaagtcacccatcagggcctgagctcgcccgtcacaaagagcttcaacaggggagagtta

SEQ ID NO: 2561 - DNA, 644 bp, Artificial Sequence
  Synthetic polynucleotide encoding artificial human antibody VL chain
gtgacatccagttgacccagtctccatccttcctgtctgcatctgtaggagacagagtcaccatcacttgccgggccagtcaggacattagcagttttttagcctggtatcagcaaaaaccagggaaagcccctgacctcctaatctatgctgcatccactttgcagagtggggtcccatcaaggttcagcggcagtggatctgggacagaattcactctcacaatcagtagcctgcagcctgaagattttgcagcttattactgtcaacaccttactagtttcccgtacacttttggccaggggaccaagctggagatcaaacgaactgtggctgcaccatctgtcttcatcttcccgccatctgatgagcagttgaaatctggaactgcctctgttgtgtgcctgctgaataacttctatcccagagaggccaaagtacagtggaaggtggataacgccctccaatcgggtaactcccaggagagtgtcacagagcaggacagcaaggacagcacctacagcctcagcagcaccctgacgctgagcaaagcagactacgagaaacacaaagtctacgcctgcgaagtcacccatcagggcctgagctcgcccgtcacaaagagcttcaacaggggagagtta

SEQ ID NO: 2562 - DNA, 645 bp, Artificial Sequence
  Synthetic polynucleotide encoding artificial human antibody VL chain
gtttcttctgagctgactcaggaccctgctgtgtctgtggccttgggacagacagtcaggatcacatgccaaggagacagcctcagagactattctgctagctggtaccagcagaagccaggacaggcccctattcttgtcatctttttcagaaacaagcggccctctgggatcccagaccgattctctggctccgcctcaggaaacacagcttccttgaccatcactggggctcaggcggaagatgaggctgactattactgtggctcccgggacagtagtggtaacccttctgtcttcggagctgggaccaaggtcaccgtcctaggtcagcccaaggccaaccccactgtcactctgttcccgccctcctctgaggagctccaagccaacaaggccacactagtgtgtctgatcagtgacttctacccgggagctgtgacagtggcctggaaggcagatggcagccccgtcaaggcgggagtggagaccaccaaaccctccaaacagagcaacaacaagtacgcggccagcagctacctgagcctgacgcccgagcagtggaagtcccacagaagctacagctgccaggtcacgcatgaagggagcaccgtggagaagacagtggcccctacagaatgttca

SEQ ID NO: 2563 - DNA, 644 bp, Artificial Sequence
  Synthetic polynucleotide encoding artificial human antibody VL chain
cagaaattgtgttgacacagtctccagccaccctgtctttgtctccaggggaaggagccaccctctcctgcagggccagtcagagtgttagcgcctacttaggctggtaccaacagaaacctggccaggctcccaggctcctcatctatgatacatccaacagggccactggcatcccagccaggttcagtggcagtgggtctgggacagacttcactctcaccatcagcagcctagagcctgaagattttgcagtttattactgtcagcagcgtagcaactggctgtacacttttggccaggggaccaagctggagatcaaacgaactgtggctgcaccatctgtcttcatcttcccgccatctgatgagcagttgaaatctggaactgcctctgttgtgtgcctgctgaataacttctatcccagagaggccaaagtacagtggaaggtggataacgccctccaatcgggtaactcccaggagagtgtcacagagcaggacagcaaggacagcacctacagcctcagcagcaccctgacgctgagcaaagcagactacgagaaacacaaagtctacgcctgcgaagtcacccatcagggcctgagctcgcccgtcacaaagagcttcaacaggggagagtgg

SEQ ID NO: 2564 - DNA, 645 bp, Artificial Sequence
  Synthetic polynucleotide encoding artificial human antibody VL chain
tcctatgtgctgactcagccaccctcagtgtcagtggccccaggaaagacggccaggattacctgtgggggaaacaacattggaagtaaaagtgtgcactggtaccagcagaagccaggccaggcccctgtgctggtcatctattatgatagcgaccggccctcagggatccctgagcgattctctggctccaactctgggaacacggccaccctgaccatcagcagggtcgaagccggggatgaggccgactattactgtcaggtgtgggatagtagtagtgatcatcaagaggtattcggcggagggaccaagctgaccgtcctaggtcagcccaaggctgccccctcggtcactctgttcccgccctcctctgaggagcttcaagccaacaaggccacactggtgtgtctcataagtgacttctacccgggagccgtgacagtggcctggaaggcagatggcagccccgtcaaggcgggagtggagaccaccacaccctccaaacaaagcaacaacaagtacgcggccagcagctatctgagcctgacgcctgagcagtggaagtcccacagaagctacagctgccaggtcacgcatgaagggagcaccgtggagaagacagtggcccctacagaatgttca

SEQ ID NO: 2565 - DNA, 648 bp, Artificial Sequence
  Synthetic polynucleotide encoding artificial human antibody VL chain
cagtctgccctgactcagcctgcctccgtgtctgggtctcctggacagtcgatcaccatctcctgcactggatccagcagtgatgttggaaattataaccttgtctcctggtaccaactacaccccggcaaagcccccaaactcatgatttatgaggtcattaagcggccctcaggagtttctagtcacttctctggctccaagtctggcaacacggcctccctgacaatctctgggctccaggctgaggacgaggctgattattactgctgctcatatgcacctagtaacacttatgtcttcggaactgggaccagggtcaccgtcctaggtcagcccaaggccaaccccactgtcactctgttcccgccctcctctgaggagctccaagccaacaaggccacactagtgtgtctgatcagtgacttctacccgggagctgtgacagtggcctggaaggcagatggcagccccgtcaaggcgggagtggagaccaccaaaccctccaaacagagcaacaacaagtacgcggccagcagctacctgagcctgacgcccgagcagtggaagtcccacagaagctacagctgccaggtcacgcatgaagggagcaccgtggagaagacagtggcccctacagaatgttca

SEQ ID NO: 2566 - DNA, 642 bp, Artificial Sequence
  Synthetic polynucleotide encoding artificial human antibody VL chain
cagattgtgttgacacagtctccagccaccctgtctttgtctccaggggaaagagtcaccctctcctgcagggccagtcagagtgtcagaagccacttagcctggtaccagcagaaacctggccaggctcccaggctcctcatgtatgatgcattcaatagggccactggcaccccagccaggttcagtggcagtgggtctgggacagacttcactctcaccattagcagcctagagcctgaagattttgcaatttattactgtcagcagcgtagcaactggcctctcactttcggcggagggaccaaggtggagatcaaacgaactgtggctgcaccatctgtcttcatcttcccgccatctgatgagcagttgaaatctggaactgcctctgttgtgtgcctgctgaataacttctatcccagagaggccaaagtacagtggaaggtggataacgccctccaatcgggtaactcccaggagagtgtcacagagcaggacagcaaggacagcacctacagcctcagcagcaccctgacgctgagcaaagcagactacgagaaacacaaagtctacgcctgcgaagtcacccatcagggcctgagctcgcccgtcacaaagagcttcaacaggggagagtta

SEQ ID NO: 2567 - DNA, 648 bp, Artificial Sequence
  Synthetic polynucleotide encoding artificial human antibody VL chain
gtttcttctgagctgactcaagaccctgctgtgtctgtggccttgggacagacagtccggatcacatgccaaggagacagcctcagaagttattatgcaacctggtaccagcagaagccaggacaggcccctctacttgtcatatttgataaagacaaacggccctcagggatcccagaccgattctccggctccagctcaggaaacacagcttccttgaccatcactggggctcagccggaagatgaggctgtctattactgtaactcccgagacagcagtgctcatgaccatctgttattcggcggagggaccacgctgaccgtcctgggtcagcccaaggctgccccctcggtcactctgttcccgccctcctctgaggagcttcaagccaacaaggccacactggtgtgtctcataagtgacttctacccgggagccgtgacagtggcctggaaggcagatagcagccccgtcaaggcgggagtggagaccaccacaccctccaaacaaagcaacaacaagtacgcggccagcagctacctgagcctgacgcctgagcagtggaagtcccacagaagctacagctgccaggtcacgcatgaagggagcaccgtggagaagacagtggcccctacagaatgttca

SEQ ID NO: 2568 - DNA, 648 bp, Artificial Sequence
  Synthetic polynucleotide encoding artificial human antibody VL chain
gaagttgttttgacgcagtctccaggcaccctgtctttgtctccaggtgagagagccaccctcttctgcaaggccagtcaggctattgtcagcaattacttagtctggtatcagcagaaacctggcctggctcccagactcctcatctacagtgcttccaccagggccactggcattccagacaggttcagtggcggtggctctggaacagacttcagtctcaccatcagcggactggaacctgaagattttgcagtttattactgtcaacactttggtgactcacccttgtacatttttggccaggggaccaaggtggagatcaaacgaactgtggctgcaccatctgtcttcatcttcccgccatctgatgagcagttgaaatctggaactgcctctgttgtgtgcctgctgaataacttctatcccagagaggccaaagtacagtggaaggtggataacgccctccaatcgggtaactcccaggagagtgtcacagagcaggacagcaaggacagcacctacagcctcagcagcaccctgacgctgagcaaagcagactacgagaaacacaaagtctacgcctgcgaagtcacccatcagggcctgagctcgcccgtcacaaagagcttcaacaggggagagtgt

SEQ ID NO: 2569 - DNA, 636 bp, Artificial Sequence
  Synthetic polynucleotide encoding artificial human antibody VL chain
ccctatgagctgactcagccactctcagtgtcggtggccctgggacagacggccagggttacctgtgggggaacgaacattggaaagaaagatgttcattggtaccaacaaaagccaggccaggcccctgtgttggtcatttatagggatgacaaccggccctctgggatccctgagcgattctctggcctcaattcggggcacacggccaccttgaccatcagcagagcccaggccggggatgaggctgattattactgtcaggtgtgggacagcagtactgcggtgttcggcggagggaccaagctgaccgtcctcggtcagcccaaggctgccccctcggtcactctgttcccgccctcctctgaggagcttcaagccaacaaggccacactggtgtgtctcataagtgacttctacccgggagccgtgacagtggcctggaaggcagatagcagccccgtcaaggcgggagtggagaccaccacaccctccaaacaaagcaacaacaagtacgcggccagcagctacctgagcctgacgcctgagcagtggaagtcccacagaagctacagctgccaggtcacgcatgaagggagcaccgtggagaagacagtggcccctacagaatgttca

SEQ ID NO: 2570 - DNA, 325 bp, Artificial Sequence
  Synthetic polynucleotide encoding artificial human antibody VL chain
ctctatgtgctgactcagccaccctcagtgtcagtggccccaggaaagacggccaggattacctgtgggggaaacaacattggaagtaaaagtgtgcactggtaccagcagaagccaggccaggcccctgtgctggtcatctatgatgatagcgaccggccctcagggatccctgagcgattctctggctccaactctgggaacacggccaccctgaccatcagcagggtcgaagccggggatgaggccgactattactgtcaggtgtgggatagtagtagtgatcatgtggtattcggcggagggaccaagctgaccgtccagg

SEQ ID NO: 2571 - DNA, 642 bp, Artificial Sequence
  Synthetic polynucleotide encoding artificial human antibody VL chain
tcctatgagctgacacagacaccctcggtgtcagtgtccccaggacagacggccaggatcacctgctctggagatgcattgccaaagcaatctgttaattggtaccagcagaggccaggccaggcccctgtggtggtgatatgtaaagacactgagaggccctcagggatccctgagcgattctctggctccacctcagggacaacagtcacgttgaccatcggtggagtccaggcagaagatgaggctgactattactgtcaatcagcagacagcagtggtttttatgtggtattcggcggagggaccaagctgaccgtcctaggtcagcccaaggctgccccctcggtcactctgttcccaccctcctctgaggagcttcaagccaacaaggccacactggtgtgtctcataagtgacttctacccgggagccgtgacagtggcctggaaggcagatagcagccccgtcaaggcgggagtggagaccaccacaccctccaaacaaagcaacaacaagtacgcggccagcagctacctgagcctgacgcctgagcagtggaagtcccacaaaagctacagctgccaggtcacgcatgaagggagcaccgtggagaagacagtggcccctacagaatgttca

SEQ ID NO: 2572 - DNA, 636 bp, Artificial Sequence
  Synthetic polynucleotide encoding artificial human antibody VL chain
tcctatgagctgacacagccaccctcggtgtcagtgtccccaggacagacggccaggatcacctgctctggagatgcattgccaaagcaatatgcttattggtaccagcagaagccaggccaggcccctgtgctggtgatatataaagacagtgagaggccctcagggatccctgagcgattctctggctccagctcagggacaacagtcacgttgaccatcagtggagtccaggcagaagacgaggctgactattactgtcaatcagcagacagcagtagtcccgtgtttggcggagggaccaagctgaccgtcctaggtcagcccaaggctgccccctcggtcactctgttcccaccctcctctgaggagcttcaagccaacaaggccacactggtgtgtctcataagtgacttctacccgggagccgtgacagtggcctggaaggcagatagcagccccgtcaaggcgggagtggagaccaccacaccctccaaacaaagcaacaacaagtacgcggccagcagctacctgagcctgacgcctgagcagtggaagtcccacagaagctacagctgccaggtcacgcatgaagggagcaccgtggagaagacagtggcccctacagaatgttca

SEQ ID NO: 2573 - DNA, 639 bp, Artificial Sequence
  Synthetic polynucleotide encoding artificial human antibody VL chain
tcctatgagctgacacagccaccctcggtgtcagtgcccccaggacaaacggccaggatcacctgctctggagatgcattgccaaaaaaatatgcttattggtaccagcagaagtcaggccaggcccctgtgctggtcatctatgaggacaccaaacgaccctccgggatccctgacagattctctggctccagctcagggacaatggccaccttgactatcagtggggcccaggtggaggatgatgctgactactactgttactcaacagacagtagggctaccggggttttcggcggagggaccaagctgaccgtcctaggtcagcccaaggctgccccctcggtcactctgttcccgccctcctctgaggagcttcaagccaacaaggccacactggtgtgtctcataagtgacttctacccgggagccgtgacagtggcctggaaggcagatagcagccccgtcaaggcgggagtggagaccaccacaccctccaaacaaagcaacaacaagtacgcggccagcagctacctgagcctgacgcctgagcagtggaagtcccacagaagctacagctgccaggtcacgcatgaagggagcaccgtggagaagacagtggcccctacagaatgttca

SEQ ID NO: 2574 - DNA, 642 bp, Artificial Sequence
  Synthetic polynucleotide encoding artificial human antibody VL chain
gccgtccagatgacccagtctccatcctccctgtctgcatctgtgggagacagagtcaccatctcttgccgggcaagtcagaccattgacacctatttaaactggtatcaacagagaccaggaaaagcccctcagctcctgatctatgctgcatccagtttgcaaagtggggtcccttcaaggttcagtgccagtggatctgggacacatttcactctcatcatcaacagtctgcaacctgaagactttgcaacttactactgtcaacagagttacagtacccctcagacgttcggccaagggaccaaggtggaaatcaaacgaactgtggctgcaccatctgtcttcatcttcccgccatctgatgagcagttgaaatctggaactgcctctgttgtgtgcctgctgaataacttctatcccagagaggccaaagtacagtggaaggtggataacgccctccaatcgggtaactcccaggagagtgtcacagagcaggacagcaaggacagcacctacagcctcagcagcaccctgacgctgagcaaagcagactacgagaaacacaaagtctacgcctgcgaagtcacccatcagggcctgagctcgcccgtcacaaagagcttcaacaggggagagtgt

SEQ ID NO: 2575 - DNA, 324 bp, Artificial Sequence
  Synthetic polynucleotide encoding artificial human antibody VL chain
gtgacatccagatgacccagtctccatcctccctgtctgcttctgtaggagacagagtcaccatcacttgccaggcgactcagggcattaccaactatttaaattggtatcagcaaaaaccagggaaagcccctaaggtcctgatctacgatgcatccaatttggaaacaggggtcccatcaaggttcagtggaaatggatctgggacacattttactttcaccatcagcagcctgcagcctgaagatatcgcaacatattactgtcaacagtatgaaaatctcccgctcactttcggcggagggaccaaggtggagatcaaac

SEQ ID NO: 2576 - DNA, 644 bp, Artificial Sequence
  Synthetic polynucleotide encoding artificial human antibody VL chain
gtgacatccagatgacccagtctccatcctccctgtctgcatctgtaggagacagagtcaccatcacttgccaggcgagtcaggacattagcacgtttttaaattggtatcagcagaaaccagggaaagcccctaagctcctgatctacgatgaatccaatttggaaacaggggtcccgtcaaggttcagtggaagtggatctgggacagattttactttcaccatcagcagcctgcagcctgaagatattgcaacatattactgtcaacagtttgataatctcccgctcactttcggcggagggaccaggttggagatcaaacgaactgtggctgcaccatctgtcttcatcttcccgccatctgatgagcagttgaaatctggaactgcctctgttgtgtgcctgctgaataacttctatcccagagaggccaaagtacagtggaaggtggataacgccctccaatcgggtaactcccaggagagtgtcacagagcaggacagcaaggacagcacctacagcctcagcagcaccctgacgctgagcaaagcagactacgagaaacacaaagtctacgcctgcgaagtcacccatcagggcctgagctcgcccgtcacaaagagcttcaacaggggagagtgt

SEQ ID NO: 2577 - DNA, 331 bp, Artificial Sequence
  Synthetic polynucleotide encoding artificial human antibody VL chain
cagtctgccctgactcagcctcgctcagtgtccgggtctcctggacagtcagtcaccatctcctgcactggaaccagcagtgatattggtggttataactatgtctcctggtaccaacaacacccaggcaaagcccccaaatttgtgatttatgatgtcagtcagcggccctcaggggtccctgatcgcttctctggctccaagtctggcaacacggcctccctgaccatctctgggctccaggctgacgatgaggctgattattactgctcctcatatgcaggcagctacacttgggtgttcggcggagggaccaaggtgatcgtcctag

SEQ ID NO: 2578 - DNA, 317 bp, Artificial Sequence
  Synthetic polynucleotide encoding artificial human antibody VL chain
tcctatgagctgactcagccaccctcagtgtccgtgtccccaggacagacagccagcatcacctgctctggagataaattgggggataaatatgcttgctggtatcagcagaagccaggccagtcccctgtggtggtcatctatcaagataccaagcggccctcagggatccctgagcgattctctggctccaactctgggaacacagccactctgaccatcagcgggacccaggctatggatgaggctgactattactgtcaggcgtgggacagcagcactgtggtatttggcggagggaccaagctgaccgtcct

SEQ ID NO: 2579 - DNA, 331 bp, Artificial Sequence
  Synthetic polynucleotide encoding artificial human antibody VL chain
ccgtctgtgttgacgcagccgccctcactgtctgcggccccaggacagagggtcaccatctcctgctctggaagcacctccaacattggaaataattttgtatcctggtaccagcagctcccaggagcagcccccaaactcctcatttatgacaatgataagcgaccctcagagattcctgaccgattctctggctccaagtctggcacgtcagccaccctggccatcaccggactccagactggggacgaggccgattattattgcggaacatgggatagcagcctgggtgcttatgtcttcggaactgggaccaaggtcaccgtcctgg

SEQ ID NO: 2580 - DNA, 644 bp, Artificial Sequence
  Synthetic polynucleotide encoding artificial human antibody VL chain
gagaaattgtgttgacgcagtctccaggcacactgtctttgtctccaggggaaagagccaccctctcctgcagggccagtcagagtatcagcagcacctacttagtctggtaccagcagaaacctggccaggctcccaggctcctcatctatgctgcgtcctatagggccactggcatcccagacaggttcagtggcagtgggtctgggacagacttcattctcaccatcagcagactggagcctgaagattttgcagtatattactgtcagcagtatggtagctcactcactttcggcggagggaccaaggtggagatcaaacgaactgtggctgcaccatctgtcttcatcttcccgccatctgatgagcagttgaaatctggaactgcctctgttgtgtgcctgctgaataacttctatcccagagaggccaaagtacagtggaaggtggataacgccctccaatcgggtaactcccaggagagtgtcacagagcaggacagcaaggacagcacctacagcctcagcagcaccctgacgctgagcaaagcagactacgagaaacacaaagtctacgcctgcgaagtcacccatcagggcctgagctcgcccgtcacaaagagcttcaacaggggagagtgt

SEQ ID NO: 2581 - DNA, 647 bp, Artificial Sequence
  Synthetic polynucleotide encoding artificial human antibody VL chain
gagaaattgagttgacgcagtctccaggcaccctgtctttgtctccaggggaaagagccaccctctcctgcagggccagtcagagtgttagcagcagctacttagcctggtaccagcagaaacctggccaggctcccaggctcctcatctatggtgcatccagcagggccactggcatcccagacaggttcagtggcagtgggtctgggacagacttcactctcaccatcagcagactggagcctgaagattttgcagtgtattactgtcagcagtatggtagctcacctctcactttcggcggagggaccaaggtggagatcaaacgaactgtggctgcaccatctgtcttcatcttcccgccatctgatgagcagttgaaatctggaactgcctctgttgtgtgcctgctgaataacttctatcccagagaggccaaagtacagtggaaggtggataacgccctccaatcgggtaactcccaggagagtgtcacagagcaggacagcaaggacagcacctacagcctcagcagcaccctgacgctgagcaaagcagactacgagaaacacaaactctacgcctgcgaagtcacccatcagggcctgagctcgcccgtcacaaagagcttcaacaggggagagtgt

SEQ ID NO: 2582 - DNA, 648 bp, Artificial Sequence
  Synthetic polynucleotide encoding artificial human antibody VL chain
gcctctgccctgactcagcctgcctccgtgtctgggtctcctggacagtcgatcaccatctcctgcaatggaagcagcagtgacgttggcgattataactatgtctcctggtaccaacaacacccaggcaaagcccccaaactcatgatttatgacgtcagtaatcggccctcaggggtttctaatcgcttctctggctccaagtctggcaacacggcctccctgaccatctctgggctccaggctgaggacgaggctgattattactgcagctcatatacaagcagcaggagtctggtgttcggcggagggaccaagctgaccgtcctaggtcagcccaaggctgccccctcggtcactctgttcccgccctcctctgaggagcttcaagccaacaaggccacactggtgtgtctcataagtgacttctacccgggagccgtgacagtggcctggaaggcagatagcagccccgtcaaggcgggagtggagaccaccacaccctccaaacaaagcaacaacaagtacgcggccagcagctatctgagcctgacgcctgagcagtggaagtcccacagaagctacagctgccaggtcacgcatgaagggagcaccgtggagaagacagtggcccctacagaatgttca

SEQ ID NO: 2583 - DNA, 644 bp, Artificial Sequence
  Synthetic polynucleotide encoding artificial human antibody VL chain
gtgacatccagatgacccagtctccatcctccctgtctgcatctgtaggagacaaagtcaccatgacctgccgggcaagtcagttcattagcgtctatgtaaattggtatcagcagaaaccagggaaagcccctaagctcctgatctatactgcgtcctctttggaaagtggggtctcatcaaggttcagtggcggcggatctgggacagatttcactctcacgatccgcagtctgcaacctgaagattttgcaatttactactgtcaacagacttacagcaccccgtggacgttcggcccagggacgagggtagaaattaaacgaactgtggctgcaccatctgtcttcatcttcccgccatctgatgagcagttgaaatctggaactgcctctgttgtgtgcctgctgaataacttctatcccagagaggccaaagtacagtggaaggtggataacgccctccaatcgggtaactcccaggagagtgtcacagagcaggacagcaaggacagcacctacagcctcagcagcaccctgacgctgagcaaagcagactacgagaaacacaaagtctacgcctgcgaagtcacccatcagggcctgagctcgcccgtcacaaagagcttcaacaggggagagtgt

SEQ ID NO: 2584 - DNA, 642 bp, Artificial Sequence
  Synthetic polynucleotide encoding artificial human antibody VL chain
ggagaagtagtgatgacgcagtctccagccacgctgtctgtgtctccaggggaaagagccaccctctcctgcagggccagtcagagtgttagcagcaaggtagcctggtaccagcagagacctggccgggctcccaggctcctcatctatggtgcatccaccagggccactgatatcccagccaggttcagtggcagtgggtctgggacagagttcactctcaccatcagcagcctgcagtctgaagattttgcagtttattactgtcaacaatataataattggctcactttcggcggagggaccaaggtggaaatcaagcgaactgtggctgcaccatctgtcttcatcttcccgccatctgatgagcagttgaaatctggaactgcctctgttgtgtgcctgctgaataacttctatcccagagaggccaaagtacagtggaaggtggataacgccctccaatcgggtaactcccaggagagtgtcacagagcaggacagcaaggacagcacctacagcctcagcagcaccctgacgctgagcaaagcagactacgagaaacacaaagtctacgcctgcgaagtcacccatcagggcctgagctcgcccgtcacaaagagcttcaacaggggagagtgg

SEQ ID NO: 2585 - DNA, 319 bp, Artificial Sequence
  Synthetic polynucleotide encoding artificial human antibody VL chain
tcctatgagctgacacagccatcctcagtgtcagtgtctccgggacagacagccaggatcacctgctcaggagatgtattggcaaaaaattatgctcggtggttccagcagaagccaggccaggcccctctgttggtgatttataaagacaatattcggccctcagggatccctgagcgattctccggctccagctcagggaccacagtcaccttgaccatcagcggggcccacgttgacgatgaggctgactattactgttactctacgcctgacaacaatggggtgttcggcggagggaccaagctgatcgtcctag

SEQ ID NO: 2586 - DNA, 648 bp, Artificial Sequence
  Synthetic polynucleotide encoding artificial human antibody VL chain
cagtctgccctgactcagcctgcctccgtgtctgggtctcctggacagtcgatcaccatctcctgcactgggaccagcagtgacgttggtgcttatccgtatgtctcctggtatcaacatcacccaggcagagcccccaaactcacgatttttgatgtcattaatcggccctcaggggtttctaatcgcttctctggctccaagtctggcaacacggcctccctgaccatctctgggctccaggctgaggacgaggctttttattactgcagctcatatacaacctccaacagtgtggtgttcggcggagggaccaaactgaccgtcctgagtcagcccaaggctgccccctcggtcactctgttcccgccctcctctgaggagcttcaagccaacaaggccacactggtgtgtctcataagtgacttctacccgggagccgtgacagtggcctggaaggcagatagcagccccgtcaaggcgggagtggagaccaccacaccctccaaacaaagcaacaacaagtacgcggccagcagctatctgagcctgacgcctgagcagtggaagtcccacagaagctacagctgccaggtcacgcatgaagggagcaccgtggagaagacagtggcccctacagaatgttca

SEQ ID NO: 2587 - DNA, 647 bp, Artificial Sequence
  Synthetic polynucleotide encoding artificial human antibody VL chain
gagaaattgtgttgacacagtctccaggcaccctgtctttgtctccaggggaaagagccaccctctcctgcagggccagtcagagtttaagcagcggttacttagcctggtaccagcagaaacctggccaggctcccaggctcctcatctatggtgcatcctacagggccactgacatcccagacaggttcagtggcagtgggtctgggacagacttcactctcaccatcagcagactggagcctgaagatttcgcagtgtattactgtcagcagtatgataactcacctctcactttcggcggagggaccaaggtggagatcaaacgaactgtggctgcaccatctgtcttcatcttcccgccatctgatgagcagttgaaatctggaactgcctctgttgtgtgcctgctgaataacttctatcccagagaggccaaagtacagtggaaggtggataacgccctccaatcgggtaactcccaggagagtgtcacagagcaggacagcaaggacagcacctacagcctcagcagcaccctgacgctgagcaaagcagactacgagaaacacaaagtctacgcctgcgaagtcacccatcagggcctgagctcgcccgtcacaaagagcttcaacaggggagagtgt

SEQ ID NO: 2588 - DNA, 340 bp, Artificial Sequence
  Synthetic polynucleotide encoding artificial human antibody VL chain
gggatcgtgatgacccagtctccagactccctggctgtgtctctgggcgagagggccaccatcaactgcaagtccagccagagtcttttatacaggtccaacgataagaactacttcgcttggtaccagcagaaaccaggacagcctcctaaactgctcatttactgggcgtctacccgggaatccggggtccctgaccgattcagtggcagcgggtcagggacagatttcactctcaccatcagcagcctgcaggctgaagatgtggcagtttattactgtcagcaatattggggtactccgtacacttttggccaggggaccaagctggagatcaaac

SEQ ID NO: 2589 - DNA, 648 bp, Artificial Sequence
  Synthetic polynucleotide encoding artificial human antibody VL chain
ccggctgtactgacgcaggcgccctcagtgtctggggccccagggcagagggtcaccatctcctgtactgggagcggctccaatatcggggctggttatgatgcacactggtatcaacaacttccaggaacagcccccaaactcctcatctatcgtaacaccaatcggccctctggggtccctgaccgattctctggctccaagtctggctcctcagcctccctggccatcactgggctccagcctgaggatgaggctgaatattattgtcagtcctatgacagtggcctgggggtggtattcggcggagggaccaaactgaccgtcctaggtcagcccaaggctgccccctcggtcactctgttcccgccctcctctgaggagcttcaagccaacaaggccacactggtgtgtctcataagtgacttctacccgggagccgtgacagtggcctggaaggcagatagcagccccgtcaaggcgggagtggagaccaccacaccctccaaacaaagcaacaacaagtacgcggccagcagctatctgagcctgacgcctgagcagtggaagtcccacagaagctacagctgccaggtcacgcatgaagggagcaccgtggagaagacagtggcccctacagaatgttca

SEQ ID NO: 2590 - DNA, 648 bp, Artificial Sequence
  Synthetic polynucleotide encoding artificial human antibody VL chain
cagtctgccctgactcagcctccctccgcgtccgggtctcctggacagtcagtcaccatctcctgcactggaaccagcagtgacgttggtggttatgaccatgtctcctggtaccaacagcacccaggcaaagcccccaaagtcatgatttatgaggtcactaagcggccctcaggggtccctgatcgcttctctggctccaagtctggcaacacggcctccctgaccgtctctgggctccaggctgaggatgaggctgaatattactgcagctcatatgcaggcatcaacaatttggtttttggcggagggaccaagctgaccgtcctaggtcagcccaaggctgccccctcggtcactctgttcccgccctcctctgaggagcttcaagccaacaaggccacactggtgtgtctcataagtgacttctacccgggagccgtgacagtggcctggaaggcagatagcagccccgtcaaggcgggagtggagaccaccacaccctccaaacaaagcaacaacaagtacgcggccagcagctatctgagcctgacgcctgagcagtggaagtcccacagaagctacagctgccaggtcacgcatgaagggagcaccgtggagaagacagtggcccctacagaatgttca

SEQ ID NO: 2591 - DNA, 644 bp, Artificial Sequence
  Synthetic polynucleotide encoding artificial human antibody VL chain
gtgacatccagatgacccagtctccttccaccctgtctgcatctgtaggcgacagagtcaccatcacttgccgggccagtcagagtattagtagctggttggcctggtatcagcagaaaccagggaaagcccctaagctcctgatctataaggcgtctagtttagaaagtggggtcccatcaaggttcagcggcagtggatctgggacagagttcactctcaccatcagcagcctgcagcctgatgattttgcaacttattactgccaacagtataatagttattctcagacgttcggccaagggaccaaggtggaaatcaaacgaactgtggctgcaccatctgtcttcatcttcccgccatctgatgagcagttgaaatctggaactgcctctgttgtgtgcctgctgaataacttctatcccagagaggccaaagtacagtggaaggtggataacgccctccaatcgggtaactcccaggagagtgtcacagagcaggacagcaaggacagcacctacagcctcagcagcaccctgacgctgagcaaagcagactacgagaaacacaaagtctacgcctgcgaagtcacccatcagggcctgagctcgcccgtcacaaagagcttcaacaggggagagtgt

SEQ ID NO: 2592 - DNA, 642 bp, Artificial Sequence
  Synthetic polynucleotide encoding artificial human antibody VL chain
gaaatagtgatgacgcagtcgccagccaccctgtctgtgtctcccggcgaaagagccaccctctcctgcagggccagtcagagtattgtcaccaacttagcctggtttcagcagaaacctgcccaggctcccaggctcctcatctatggtgcatccaccagggccactgatgtcccagccagattcagtggcagtgggtctgggacagagttcactctcaccgtcagcagcctgcagtctgaagattttgcaatttatttctgtcagcagtatactgactggccgtacacttttggccaggggaccaagctggagatcaaacgaactgtggctgcaccatctgtcttcatcttcccgccatctgatgagcagttgaaatctggaactgcctctgttgtgtgcctgctgaataacttctatcccagagaggccaaagtacagtggaaggtggataacgccctccaatcgggtaactcccaggagagtgtcacagagcaggacagcaaggacagcacctacagcctcagcagcaccctgacgctgagcaaagcagactacgagaaacacaaagtctacgcctgcgaagtcacccatcagggcctgagctcgcccgtcacaaagagcttcaacaggggagagtgt

SEQ ID NO: 2593 - DNA, 648 bp, Artificial Sequence
  Synthetic polynucleotide encoding artificial human antibody VL chain
ccccttgtgctgactcaatcgccctctgcctctgcctccctgggagcctcggtcaagctcacctgcactctgagtagtgggcacagcacctacgccatcgcatggcatcagcagcggccagagaagggccctcggtacttgatgaagcttaacagtgatggcagccacatcaagggggacgggatccctgctcgcttctcaggcgccagctctggggttgaccgctacctcatcatctccagttcacagtctgaggatgaggctgactattactgtcagacctggggcactgttggcgtgttcggcggagggaccaagctgaccgtcctaggtcagcccaaggctgccccctcggtcactctgttcccgccctcctctgaggagcttcaagccaacaaggccacactggtgtgtctcataagtgacttctacccgggagccgtgacagtggcctggaaggcagatagcagccccgtcaaggcgggagtggagaccaccacaccctccaaacaaagcaacaacaagtacgcggccagcagctacctgagcctgacgcctgagcagtggaagtcccacaaaagctacagctgccaggtcacgcatgaagggagcaccgtggagaagacagtggcccctacagaatgttca

SEQ ID NO: 2594 - DNA, 645 bp, Artificial Sequence
  Synthetic polynucleotide encoding artificial human antibody VL chain
gaaattgtgttgacgcagtctccaggcaccctgtctttgtctccaggggaaagagccaccctctcctgcagggccggtcagagtgttagcagcagctacttagcctggtaccagcagaaacctggccaggctcccaggctcctcatctatggtgcatccagcagggccactggcatcccagacaggttcagtggcagtgggtctgggacagacttcactctcaccatcagcagactggagcctgaagattttgcagtgtattactgtcagcagtatggtagctcaccgtggacgttcggccaagggaccaaggtggaaatcaaacgaactgtggctgcaccatctgtcttcatcttcccgccatctgatgagcagttgaaatctggaactgcctctgttgtgtgcctgctgaataacttctatcccagagaggccaaagtacagtggaaggtggataacgccctccaatcgggtaactcccaggagagtgtcacagagcaggacagcaaggacagcacctacagcctcagcagcaccctgacgctgagcaaagcagactacgagaaacacaaagtctacgcctgcgaagtcacccatcagggcctgagctcgcccgtcacaaagagcttcaacaggggagagtgt

SEQ ID NO: 2595 - DNA, 651 bp, Artificial Sequence
  Synthetic polynucleotide encoding artificial human antibody VL chain
cagtctgtgctgacgcagccgccctcagtgtctggggccccagggcagagggtcaccatcccctgcactgggagcagctccaacctcggggcaggttatgctgtacactggtaccagcagcttccagcaacaacccccaaactcctcatctatgctaacagcagtcgaccctcaggggtccctgaccgattctctggctccaggtctgacacctcagcctccctggccatcactgggctccaggctgaggatgaggctgattattactgccagtcttatgacagcagcctgagtggttatgtcttcggaactgggacctgggtcaccgtcctaagtcagcccaaggccaaccccactgtcactctgttcccgccctcctctgaggagctccaagccaacaaggccacactagtgtgtctgatcagtgacttctacccgggagctgtgacagtggcctggaaggcagatggcagccccgtcaaggcgggagtggagaccaccaaaccctccaaacagagcaacaacaagtacgcggccagcagctacctgagcctgacgcccgagcagtggaagtcccacagaagctacagctgccaggtcacgcatgaagggagcaccgtggagaagacagtggcccctacagaatgttca

SEQ ID NO: 2596 - DNA, 651 bp, Artificial Sequence
  Synthetic polynucleotide encoding artificial human antibody VL chain
cagtctgtgttgacgcagccgccctcagtgtctggggccccaggccagaggatcaccatctcctgcactggaggcagcaccaacatcgggacaatttatgatgttcactggtaccaacagcttcccggagcagcccccaaactcctcatctatggtaacagtcgtcgaccctcaggggtccctgaccgattctctgcctccaagtctggcacctcagcctccctggccatcagtgggctccggcctgaggatgaggcggattattactgccagtgttttgacaccagcctgactgcaaaggtgttcggcggagggaccaagctgaccgtcctaggtcagcccaaggctgccccctcggtcactctgttcccgccctcctctgaggagcttcaagccaacaaggccacactggtgtgtctcataagtgacttctacccgggagccgtgacagtggcctggaaggcagatagcagccccgtcaaggcgggagtggagaccaccacaccctccaaacaaagcaacaacaagtacgcggccagcagctatctgagcctgacgcctgagcagtggaagtcccacagaagctacagctgccaggtcacgcatgaagggagcaccgtggagaagacagtggcccctacagaatgttca

SEQ ID NO: 2597 - DNA, 337 bp, Artificial Sequence
  Synthetic polynucleotide encoding artificial human antibody VL chain
gatattctgctgactcagtctccactcttcctgtccgtcacccctggagagccggcctccatctcctgcaggtctaatcagagcctcctttctagtaatggacatcatcttttggattggtacttccaaaaaccaggccagtctcctcaactcctgatgtttctgggttctactcgggcctccggggtccctgacaggttcagtggcagtgcatcaggcacagaatttacactgaaaatcagcacagtggaggcggaagattttggagtgtattactgcatgcaagctctacaagttcctcggacgttcggccgagggaccaaggtggaaatcaaac

SEQ ID NO: 2598 - DNA, 644 bp, Artificial Sequence
  Synthetic polynucleotide encoding artificial human antibody VL chain
gtgacatccagttgacccagtctccatccttcctgtctgcatctgtaggagacagagtcaccatcacttgccgggccagtcagggcattagcagttatttagcctggtatcagcaaaaaccagggaaagcccctaagctcctgatctatgctgcatccactttgcaaagtggggtcccatcacggttcagcggcagtggatctgggacagaattcactctcacaatcagcagcctgcagcctgaagattttgcaacttattactgtcaacaacttaatagttacccgctcactttcggcggagggaccaaggtggagatcaaacgaactgtggctgcaccatctgtcttcatcttcccgccatctgatgagcagttgaaatctggaactgcctctgttgtgtgcctgctgaataacttctatcccagagaggccaaagtacagtggaaggtggataacgccctccaatcgggtaactcccaggagagtgtcacagagcaggacagcaaggacagcacctacagcctcagcagcaccctgacgctgagcaaagcagactacgagaaacacaaactctacgcctgcgaagtcacccatcagggcctgagctcgcccgtcacaaagagcttcaacaggggagagtta

SEQ ID NO: 2599 - DNA, 648 bp, Artificial Sequence
  Synthetic polynucleotide encoding artificial human antibody VL chain
ccggctgtgctgactcagccaccctcagcgtctgggacccccgggcagagggtcaccatctcttgttctggaagcaactccaacatcggaagtacttttgtatactggtaccagcagctcccaggaacggcccccaaactcctcatccatagtaataatcagcggccctcaggggtccctgaccgagtctctggctccaagtctggcacctcagcctccctggccatcagtgggctccggtccgaggatgaggctgattattactgtgcagcatgggatgacagcctgagtggtccggtgttcggcggagggaccaagctgaccgtcctaggtcagcccaaggctgccccctcggtcactctgttcccaccctcctctgaggagcttcaagccaacaaggccacactggtgtgtctcataagtgacttctacccgggagccgtgacagtggcctggaaggcagatagcagccccgtcaaggcgggagtggagaccaccacaccctccaaacaaagcaacaacaagtacgcggccagcagctacctgagcctgacgcctgagcagtggaagtcccacaaaagctacagctgccaggtcacgcatgaagggagcaccgtggagaagacagtggcccctacagaatgttca

SEQ ID NO: 2600 - DNA, 657 bp, Artificial Sequence
  Synthetic polynucleotide encoding artificial human antibody VL chain
gatattgtgttgactcagtctccactctccctgcccgtcacccctggagagccggcctccatctcctgcaggtctagtcagagcctcctgcatagtaatggagtctactacttggattggtacctgctgaagccaggacagtctccacaactcgtgatctatatgggttcgagtcgggcctccggggtccctgacaggttcagtggcagtggatcaggcacggattttagactgaaaatcagcagagtggaggctgaggatgttggaatttattactgcatgcaagctctgcaaactccgtggacgttcggccaagggaccaaggtggaaatcaaacgaactgtggctgcaccatctgtcttcatcttcccgccatctgatgagcagttgaaatctggaactgcctctgttgtgtgcctgctgaataacttctatcccagagaggccaaagtacagtggaaggtggataacgccctccaatcgggtaactcccaggagagtgtcacagagcaggacagcaaggacagcacctacagcctcagcagcaccctgacgctgagcaaagcagactacgagaaacacaaagtctacgcctgcgaagtcacccatcagggcctgagctcgcccgtcacaaagagcttcaacaggggagagtgg

SEQ ID NO: 2601 - DNA, 648 bp, Artificial Sequence
  Synthetic polynucleotide encoding artificial human antibody VL chain
gtttcttctgagctgactcaggaccctgctgtgtctgtggccttgggacagacagtcaggatcacatgccaaggagacagcctcagaagctattttgcaacctggtatcagcagaagccaggacaggcccctgttcttgtcatctatggtaaaaacagccggccctcagggatcccagaccgattctctggctccacctcaggaaacacagcttccttgaccatctctggggctcaggcggaagatgaggctgactattactgtaactcccgggacagcagtgatgaccatctggaagtattcggcggagggaccaagctgaccgtcctaggtcagcccaaggctgccccctcggtcactctgttcccgccctcctctgaggagcttcaagccaacaaggccacactggtgtgtctcataagtgacttctacccgggagccgtgacagtggcctggaaggcagatagcagccccgtcaaggcgggagtggagaccaccacaccctccaaacaaagcaacaacaagtacgcggccagcagctatctgagcctgacgcctgagcagtggaagtcccacagaagctacagctgccaggtcacgcatgaagggagcaccgtggagaagacagtggcccctacagaatgttca

SEQ ID NO: 2602 - DNA, 644 bp, Artificial Sequence
  Synthetic polynucleotide encoding artificial human antibody VL chain
gttacatccagatgacccagtctccttccaccctgtctgcatctgtaggagacagagtcaccatcacttgccgggccagtcagagtataagtagttggttggcctggtttcagcagaaaccagggaaagcccctaaactcctgatctataaggcgtctactttagaaagtggggtcccatcaagattcagcggcagtgaatctgggacagaattcactctcaccatcggcagcctgcagcctgatgattttgcaacttattactgtcaacagtataatagttacccgaggacgttcggccaagggaccaaggtggatatcaaacgaactgtggctgcaccatctgtcttcatcttcccgccatctgatgagcagttgaaatctggaactgcctctgttgtgtgcctgctgaataacttctatcccagagaggccaaagtacagtggaaggtggataacgccctccaatcgggtaactcccaggagagtgtcacagagcaggacagcaaggacagcacctacagcctcagcagcaccctgacgctgagcaaagcagactacgagaaacacaaagtctacgcctgcgaagtcacccatcagggcctgagctcgcccgtcacaaagagcttcaacaggggagagtgt

SEQ ID NO: 2603 - DNA, 662 bp, Artificial Sequence
  Synthetic polynucleotide encoding artificial human antibody VL chain
gtgacatcgtgatgacccagtctccagactccctggctgtgactctgggcgagagggccaccatcaactgtaggtccagccagactgttttatacgactccaacaataaaaactacttagcttggtatcagcagaaaccaggacagcctcctaaactactcatttactgggcgtctattcgggaatctggggtccctgaccgattcagtggcagcgggtctgggacagatttcactctcaccatcaacaccctgcaggctgaagatgtggcaatttatttctgtcagcaatattttactactcctcgcacgttcggccaagggaccaaggtggaaatcaaacgaactgtggctgcaccatctgtcttcatcttcccgccatctgatgagcagttgaaatctggaactgcctctgttgtgtgcctgctgaataacttctatcccagagaggccaaagtacagtggaaggtggataacgccctccaatcgggtaactcccaggagagtgtcacagagcaggacagcaaggacagcacctacagcctcagcagcaccctgacgctgagcaaagcagactacgagaaacacaaagtctacgcctgcgaagtcacccatcagggcctgagctcgcccgtcacaaagagcttcaacaggggagagtta

SEQ ID NO: 2604 - DNA, 651 bp, Artificial Sequence
  Synthetic polynucleotide encoding artificial human antibody VL chain
cccgctgtgctgactcagccaccctcagtgtctgggacccccgggcagagggtcaccatctcttgttctggaggcagcagcaacatcggaggtaagtatgtatactggtaccagcaactcccaggaacggcccccaaggttgtcatctacaggaataatcagcggccctcaggagtctctgaccgattctctggctccaagtctggcatttcagcctccctgaccatcagtgggctccggtccgaggatgaggctgtttattactgtgcagcatgggatgacggcctgggtggcctttatgtgttcggaactgggaccaaggtcaccgccctaggtcagcccaaggccaaccccactgtcactctgttcccgccctcctctgaggagctccaagccaacaaggccacactagtgtgtctgatcagtgacttctacccgggagctgtgacagtggcctggaaggcagatggcagccccgtcaaggcgggagtggagaccaccaaaccctccaaacagagcaacaacaagtacgcggccagcagctacctgagcctgacgcccgagcagtggaagtcccacagaagctacagctgccaggtcacgcatgaagggagcaccgtggagaagacagtggcccctacagaatgttca

SEQ ID NO: 2605 - DNA, 639 bp, Artificial Sequence
  Synthetic polynucleotide encoding artificial human antibody VL chain
gacatccagatgacccagtctccttccaccctgtctgcatctgtaggagacagagtcaccatctcttgccgggccagtcagagtattagtgactggttggcctggtatcagcagaagccagggaaagcccctaagctcctgatctatgctgcatccattttacaaagtggggtcccatcaagattcagcggcagtggatctgggacagaattcactctcaccatcagcagcctgcagaccgatgattttgcaacttattactgccaacagtataatagggggtccactttcggccctgggaccaaagtggatatcaaacgaactgtggctgcaccatctgtcttcatcttcccgccatctgatgagcagttgaaatctggaactgcctctgttgtgtgcctgctgaataacttctatcccagagaggccaaagtacagtggaaggtggataacgccctccaatcgggtaactcccaggagagtgtcacagagcaggacagcaaggacagcacctacagcctcagcagcaccctgacgctgagcaaagcagactacgagaaacacaaagtctacgcctgcgaagtcacccatcagggcctgagctcgcccgtcacaaagagcttcaacaggggagagtgg

SEQ ID NO: 2606 - DNA, 642 bp, Artificial Sequence
  Synthetic polynucleotide encoding artificial human antibody VL chain
tcctatgtgctgcctcagccaccctcagtgtcagtggccccaggacagacggccaaaatcacctgtgggggaaacaaccctggaattaagagtgtgcactggtaccagcagaggccaggccaggcccccgtgctggtcatctatgacgatagcgaccggccctcagggatccctgagcgattctctggctccaactctgggaacacggtcaccctgaccatcagctgggtcgaagccggggatgaggccgactattactgtcaggtgtgggacaggaatagtcatcgtgtgattttcggcggagggaccaagctgaccgtcctaggtcagcccaaggctgccccctcggtcactctgttcccgccctcctctgaggagcttcaagccaacaaggccacactggtgtgtctcataagtgacttctacccgggagccgtgacagtggcctggaaggcagatagcagccccgtcaaggcgggagtggagaccaccacaccctccaaacaaagcaacaacaagtacgcggccagcagctatctgagcctgacgcctgagcagtggaagtcccacagaagctacagctgccaggtcacgcatgaagggagcaccgtggagaagacagtggcccctacagaatgttca

SEQ ID NO: 2607 - DNA, 651 bp, Artificial Sequence
  Synthetic polynucleotide encoding artificial human antibody VL chain
ccctctgtgctgacgcagccgccctcagtgtctggggccccggggcagagggtcaccatctcctgcactgggagcacctccaacatcggggcagattatgatgtacactggtaccaacaacttccaagaacagcccccaaactcctcatctatgctaacaacaatcggccctcaggggtccctgaccggttctctggctccaagtctggcacctcagcctccctggccatcactgggctccaggctgaggatgaggctgattattactgccagtcctatgacaacagtctgagtgcttgggtgttcggcggagggaccaagttgaccgtcctaggtcagcccaaggctgccccctcggtcactctgttcccaccctcctctgaggagcttcaagccaacaaggccacactggtgtgtctcataagtgacttctacccgggagccgtgacagtggcctggaaggcagatagcagccccgtcaaggcgggagtggagaccaccacaccctccaaacaaagcaacaacaagtacgcggccagcagctacctgagcctgacgcctgagcagtggaagtcccacaaaagctacagctgccaggtcacgcatgaagggagcaccgtggagaagacagtggcccctacagaatgttca

SEQ ID NO: 2608 - DNA, 642 bp, Artificial Sequence
  Synthetic polynucleotide encoding artificial human antibody VL chain
tcttctgagctgactcaggaccctgctgtgtctgtggccttgggacagacagtcaggatcacatgccaaggagacagcctcagaagcttttatggaagctggtaccagcagaagccaggacaggcccctgtacttgtcatctatggtgaaaacaaccggccctcagggatcccagaccgattctctggctccagctcaggaaacacagcttccttgaccatcactggggctcaggcggaagatgaggctgactattactgtaactcccgggacagcagtggtaaccattgggtgttcggcggagggaccaagctgaccgtcctaggtcagcccaaggctgccccctcggtcactctgttcccaccctcctctgaggagcttcaagccaacaaggccacactggtgtgtctcataagtgacttctacccgggagccgtgacagtggcctggaaggcagatagcagccccgtcaaggcgggagtggagaccaccacaccctccaaacaaagcaacaacaagtacgcggccagcagctacctgagcctgacgcctgagcagtggaagtcccacaaaagctacagctgccaggtcacgcatgaagggagcaccgtggagaagacagtggcccctacagaatgttca

SEQ ID NO: 2609 - DNA, 651 bp, Artificial Sequence
  Synthetic polynucleotide encoding artificial human antibody VL chain
cagtctgccctgactcagcctgcctccgtgtctgggtctcctggacagtcgatcaccatctcctgcactggaatcagcagtgacgttgatggttataattatgtctcctggtaccaactctactcaggtaaagcccccaaactcataatttatgatgtcactaatcggccctcaggggtttctcatcgcttctctggctccaagtctggcaacacggcctccctgaccatctctgggctccaggctgaggacgaggctgattactactgcagctcatatataaggagcagcactcctgtggtattcggcggagggaccaagctgaccgtcctaggtcagcccaaggctgccccctcggtcactctgttcccgccctcctctgaggagcttcaagccaacaaggccacactggtgtgtctcataagtgacttctacccgggagccgtgacagtggcctggaaggcagatagcagccccgtcaaggcgggagtggagaccaccacaccctccaaacaaagcaacaacaagtacgcggccagcagctatctgagcctgacgcctgagcagtggaagtcccacagaagctacagctgccaggtcacgcatgaagggagcaccgtggagaagacagtggcccctacagaatgttca

SEQ ID NO: 2610 - DNA, 662 bp, Artificial Sequence
  Synthetic polynucleotide encoding artificial human antibody VL chain
gggacatcgtgatgacccagtctccagactccctggctgtgtctctgggcgagagggccaccatcaactgcaagtccagccagagtgttttatacagctccgacaataagaactacttagcttggtaccagcagaaaccaggacagcctcctaagctgctcatttactgggcatctacccgggaatccggggtccctgaccgattcagtggcagcgggtctgggacagatttcactctcaccatcagcagcctggaggctgaagatgtggcagtttattactgtcagcagtattatgatactccctacacttttggccaggggaccaagctggagatcaaacgaactgtggctgcaccatctgtcttcatcttcccgccatctgatgagcagttgaaatctggaactgcctctgttgtgtgcctgctgaataacttctatcccagagaggccaaagtacagtggaaggtggataacgccctccaatcgggtaactcccaggagagtgtcacagagcaggacagcaaggacagcacctacagcctcagcagcaccctgacgctgagcaaagcagactacgagaaacacaaagtctacgcctgcgaagtcacccatcagggcctgagctcgcccgtcacaaagagcttcaacaggggagagtgt

SEQ ID NO: 2611 - DNA, 648 bp, Artificial Sequence
  Synthetic polynucleotide encoding artificial human antibody VL chain
gcctctgccctgactcagcctgcctccgtgtctgggtctcctggacagtcgatcaccatctcctgcactggaaccagcagtgacgttggtggttataactatgtctcctggtaccaacagcacccaggcaaagcccccaaactcatgatttatgaggtcagtaatcggccctcaggggtttctaatcgcttctctggctccaagtctggcaacacggcctccctgaccatctctgggctccaggctgaggacgaggctgattattactgcagctcatatacaagcagcagcactctggtgttcggcggagggaccaagctgaccgtcctaggtcagcccaaggctgccccctcggtcactctgttcccaccctcctctgaggagcttcaagccaacaaggccacactggtgtgtctcataagtgacttctacccgggagccgtgacagtggcctggaaggcagatagcagccccgtcaaggcgggagtggagaccaccacaccctccaaacaaagcaacaacaagtacgcggccagcagctacctgagcctgacgcctgagcagtggaagtcccacaaaagctacagctgccaggtcacgcatgaagggagcaccgtggagaagacagtggcccctacagaatgttca

SEQ ID NO: 2612 - DNA, 641 bp, Artificial Sequence
  Synthetic polynucleotide encoding artificial human antibody VL chain
gtgacatccagatgacccagtctccatcctccctgtctgcatctgtaggagacagagtcaccatcacttgccaggcgagtcaggacattagcaactatttaaattggtatcagcagaaaccagggaaagcccctaagctcctgatctacgatgcatccaatttggaaacaggggtcccatcaaggttcagtggaagtggatctgggacagattttactttcaccatcagcagcctgcagcctgaagatattgcaacatattactgtcaacagtatgataatctctggacgttcggccaagggaccaaggtggaaatcaaacgaactgtggctgcaccatctgtcttcatcttcccgccatctgatgagcagttgaaatctggaactgcctctgttgtgtgcctgctgaataacttctatcccagagaggccaaagtacagtggaaggtggataacgccctccaatcgggtaactcccaggagagtgtcacagagcaggacagcaaggacagcacctacagcctcagcagcaccctgacgctgagcaaagcagactacgagaaacacaaagtctacgcctgcgaagtcacccatcagggcctgagctcgcccgtcacaaagagcttcaacaggggagagtgt

SEQ ID NO: 2613 - DNA, 645 bp, Artificial Sequence
  Synthetic polynucleotide encoding artificial human antibody VL chain
ccctatgtgctgactcagccaccctcggtgtcagtggccccaggacagacggccaggattacctgtgggggaaacaacattggaagtaaaagtgtgcactggtaccagcagaagccaggccaggcccctgtgttggtcgtctatgatgatagtgaccggccctcagggatccctgagcgattctctggctccaactctgggaacacggccaccctgaccatcagcagggtcgaagccggggatgaggccgactattactgtcaggtgtgggatagtagtagtgatcatctttatgtcttcggaactgggaccaaggtcaccgtcctaggtcagcccaaggccaaccccactgtcactctgttcccgccctcctctgaggagctccaagccaacaaggccacactagtgtgtctgatcagtgacttctacccgggagctgtgacagtggcctggaaggcagatggcagccccgtcaaggcgggagtggagaccaccaaaccctccaaacagagcaacaacaagtacgcggccagcagctacctgagcctgacgcccgagcagtggaagtcccacagaagctacagctgccaggtcacgcatgaagggagcaccgtggagaagacagtggcccctacagaatgttca

SEQ ID NO: 2614 - DNA, 645 bp, Artificial Sequence
  Synthetic polynucleotide encoding artificial human antibody VL chain
gaaattgtcttggcgcagtctccaggcaccctatatttgtctccgggggaaagagccacgctctcctgcagggccagtcagagtgtaagaggcaattatttggcctggtaccagcagaggcctggccaggctccccggctcctcatctatggggcctccagcagggccactggcatcccagacaggttcggcggcagtgggtctgggacagacttcactctcaccatcaccagactgctgcctgaagattttgcagtgtactactgtcaccagtatggtagctcaccaaggacgttcggccaagggaccaaggtggaaatcaaacgaactgtggctgcaccatctgtcttcatcttcccgccatctgatgagcagttgaaatctggaactgcctctgttgtgtgcctgctgaataacttctatcccagagaggccaaagtacagtggaaggtggataacgccctccaatcgggtaactcccaggagagtgtcacagagcaggacagcaaggacagcacctacagcctcagcagcaccctgacgctgagcaaagcagactacgagaaacacaaagtctacgcctgcgaagtcacccatcagggcctgagctcgcccgtcacaaagagcttcaacaggggagagtgt

SEQ ID NO: 2615 - DNA, 651 bp, Artificial Sequence
  Synthetic polynucleotide encoding artificial human antibody VL chain
cagtctgtgttgacgcagccgccctcagtgtctgcggccacgggacagaaggtcaccatctcctgctctggaggcagctccaacattgggagtaattatgtatcctggtaccaacaactcccaggaacagcccccaaacttctcatctttgaaaataataagcgaccctcagggattcctgaccgattctctggctccaagtctggcacgtcagccaccctgggcatcaccggactccagactggggacgaggccgattattactgcggaacatgggacagcagcctgactggtggttttgtcttcgggactgggaccaaggtcaccgtcctaggtcagcccaaggccaaccccactgtcactctgttcccgccctcctctgaggagctccaagccaacaaggccacactagtgtgtctgatcagtgacttctacccgggagctgtgacagtggcctggaaggcagatggcagccccgtcaaggcgggagtggagaccaccaaaccctccaaacagagcaacaacaagtacgcggccagcagctacctgagcctgacgcccgagcagtggaagtcccacagaagctacagctgccaggtcacgcatgaagggagcaccgtggagaagacagtggcccctacagaatgttca

SEQ ID NO: 2616 - DNA, 642 bp, Artificial Sequence
  Synthetic polynucleotide encoding artificial human antibody VL chain
tcctatgtcctgactcagcccccctcagtgtcagtggccccaggaaagacggccactatcgcctgtggggaaaacaacattggaagttacaatgtgaactggtaccaacagaggccaggccaggcccctgtattagtaatccattctgatagcgaccggccctcggggatctctgagcgattctctggctccaactctgggaacacggccaccctgaccatcagcagggtcgaagccggggatgaggccgactattactgtcaggtgtgggacacttctaatgatgtgggggtgttcggcggagggaccaagctgaccgtcctaggtcagcccaaggctgccccctcggtcactctgttcccgccctcctctgaggagcttcaagccaacaaggccacactggtgtgtctcataagtgacttctacccgggagccgtgacagtggcctggaaggcagatagcagccccgtcaaggcgggagtggagaccaccacaccctccaaacaaagcaacaacaagtacgcggccagcagctacctgagcctgacgcctgagcagtggaagtcccacagaagctacagctgccaggtcacgcatgaagggagcaccgtggagaagacagtggcccctacagaatgttca

SEQ ID NO: 2617 - DNA, 647 bp, Artificial Sequence
  Synthetic polynucleotide encoding artificial human antibody VL chain
gagaaattgtgttgacgcagtctccaggcaccctgtctttgtctccagggggaagagccaccctctcctgcagggccagtcagagggttagcagcaactacttagcctggtaccaacagaaacctggccaggctcccaggctcctcatctatggtccatccagcagggccactggcgtcccagacaggttcagtagcagtgggtctgggacagacttcactctcagcatcagcagactggagcctgaagattttgcagtgtatttctgtcagcagtatggtagctcacctccgactttcggcggagggaccaaggtggagatcaaacgaactgtggctgcaccatctgtcttcatcttcccgccatctgatgagcagttgaaatctggaactgcctctgttgtgtgcctgctgaataacttctatcccagagaggccaaagtacagtggaaggtggataacgccctccaatcgggtaactcccaggagagtgtcacagagcaggacagcaaggacagcacctacagcctcagcagcaccctgacgctgagcaaagcagactacgagaaacacaaagtctacgcctgcgaagtcacccatcagggcctgagctcgcccgtcacaaagagcttcaacaggggagagtgt

SEQ ID NO: 2618 - DNA, 648 bp, Artificial Sequence
  Synthetic polynucleotide encoding artificial human antibody VL chain
gcctctgccctgactcagcctgcctccgtgtctgggtctcctggacagtcgatcaccatctcctgcactggaaccagcagtgatgttgggagttataaccttgtctcctggtaccaacaacacccaggcaaagcccccgaactcatgatttatgagggcagtaagcggccctcaggggtttctaatcgcttctctggctccaagtctggcaacacggcctccctgacaatctctggactccaggctgaggacgaggctgattattactgctgctcatatgcaggtagtagcaattgggtgttcggcggagggaccaagctgaccgtcctaggtcagcccaaggctgccccctcggtcactctgttcccgccctcctctgaggagcttcaagccaacaaggccacactggtgtgtctcataagtgacttctacccgggagccgtgacagtggcctggaaggcagatagcagccccgtcaaggcgggagtggagaccaccacaccctccaaacaaagcaacaacaagtacgcggccagcagctacctgagcctgacgcctgagcagtggaagtcccacaaaagctacagctgccaggtcacgcatgaagggagcaccgtggagaagacagtggcccctacagaatgttca

SEQ ID NO: 2619 - DNA, 654 bp, Artificial Sequence
  Synthetic polynucleotide encoding artificial human antibody VL chain
gatgttgtaatgactcagtctccactctacctgcccgtcacccttggacagccggcctccatctcctgcagggctagtcaaagcctcgtatacagtgatggaaacacctacttgaattgggttcatcagaggccaggccaatctccaaggcgcctaatttacatggtttctcagcggggctctggggtcccagacagattcagcggcagcgggtcagacactgatttcacactgaaaatcagcagggtggaggctgaggatgttggggtttattactgcatgcaaggtacacactggtccgcttttggccaggggaccaagctggagatcaaacgaactgtggctgcaccatctgtcttcatcttcccgccatctgatgagcagttgaaatctggaactgcctctgttgtgtgcctgctgaataacttctatcccagagaggccaaagtacagtggaaggtggataacgccctccaatcgggtaactcccaggagagtgtcacagagcaggacagcaaggacagcacctacagcctcagcagcaccctgacgctgagcaaagcagactacgagaaacacaaagtctacgcctgcgaagtcacccatcagggcctgagctcgcccgtcacaaagagcttcaacaggggagagtgt

SEQ ID NO: 2620 - DNA, 648 bp, Artificial Sequence
  Synthetic polynucleotide encoding artificial human antibody VL chain
ccctctgtgctgactcagccaccctcagcgtctgggacccccgggcagagggtcaccatctcttgttctggaagcagctccaacatcggaagtaattatgtatactggtaccagcagctcccaggaacggcccccaaactcctcatctataggaataatcagcggccctcaggggtccctgaccgattctctggctccaagtctggcacctcagcctccctggccatcagtgggctccggtccgaggatgaggctgattattactgtgcagcatgggatgacagcctgagtggtcaggtgttcggcggagggaccaagctgaccgtcctaggtcagcccaaggctgccccctcggtcactctgttcccgccctcctctgaggagcttcaagccaacaaggccacactggtgtgtctcataagtgacttctacccgggagccgtgacagtggcctggaaggcagatagcagccccgtcaaggcgggagtggagaccaccacaccctccaaacaaagcaacaacaagtacgcggccagcagctacctgagcctgacgcctgagcagtggaagtcccacaaaagctacagctgccaggtcacgcatgaagggagcaccgtggagaagacagtggcccctacagaatgttca

SEQ ID NO: 2621 - DNA, 642 bp, Artificial Sequence
  Synthetic polynucleotide encoding artificial human antibody VL chain
gtttcttctgagctgactcaggaccctgctgtgtctgtggccttgggacagacagtcaggatcacatgccaaggagacagcctcagaagctattatgcaagctggtaccagcagaggccaggacaggcccctgtacttgtcatctatggtaaaaacaaccggccctcagggatcccagaccgattctctggctccagctcaggaaacacagcttccttgaccatcactggggctcaggcggaagatgaggctgactattactgtaactcccgggacagcagtggtaaccatgtcttcggaactgggaccaaggtcaccgtcctaggtcagcccaaggccaaccccactgtcactctgttcccgccctcctctgaggagctccaagccaacaaggccacactagtgtgtctgatcagtgacttctacccgggagctgtgacagtggcctggaaggcagatggcagccccgtcaaggcgggagtggagaccaccaaaccctccaaacagagcaacaacaagtacgcggccagcagctacctgagcctgacgcccgagcagtggaagtcccacagaagctacagctgccaggtcacgcatgaagggagcaccgtggagaagacagtggcccctacagaatgttca

SEQ ID NO: 2622 - DNA, 641 bp, Artificial Sequence
  Synthetic polynucleotide encoding artificial human antibody VL chain
gtgacatccagatgacccagtctccatcctccctgtctgcatctgtaggagacagagtcaccatcacttgccgggcaagtcagagcattagcagctatttaaattggtatcagcagaaaccagggaaagcccctaagctcctgatctatgctgcatccagtttgcaaagtggggtcccatcaaggttcagtggcagtggatctgggacagatttcactctcaccatcagcagtctgcaacctgaagattttgcaacttactactgtcaacagagttacagtactcccaccttcggccaagggacacgactggagatcaaacgaactgtggctgcaccatctgtcttcatcttcccgccatctgatgagcagttgaaatctggaactgcctctgttgtgtgcctgctgaataacttctatcccagagaggccaaagtacagtggaaggtggataacgccctccaatcgggtaactcccaggagagtgtcacagagcaggacagcaaggacagcacctacagcctcagcagcaccctgacgctgagcaaagcagactacgagaaacacaaagtctacgcctgcgaagtcacccatcagggcctgagctcgcccgtcacaaagagcttcaacaggggagagtgt

SEQ ID NO: 2623 - DNA, 641 bp, Artificial Sequence
  Synthetic polynucleotide encoding artificial human antibody VL chain
cctatgtgctgactcagccaccctcggtgtccgtggccccaggacagacggccaggattacctgtgggggaaacaacattggatatagaaatgtgtactggtaccaccaaaagccaggccaggcccctgtgctggtcgtctatgatgatagcgaccggccctcagggatccctgagcgattctctggctccaactctgggaacacggccaccctgaccatcagcagggtcgaagccggggatgaggccgactatttttgtcaggtgtgggaaagtggtggtgatcatccggtgttcggcggagggaccaagttgaccgtcctaggtcagcccaaggctgccccctcggtcactctgttcccgccctcctctgaggagcttcaagccaacaaggccacactggtgtgtctcataagtgacttctacccgggagccgtgacagtggcctggaaggcagatagcagccccgtcaaggcgggagtggagaccaccacaccctccaaacaaagcaacaacaagtacgcggccagcagctatctgagcctgacgcctgagcagtggaagtcccacagaagctacagctgccaggtcacgcatgaagggagcaccgtggagaagacagtggcccctacagaatgttca

SEQ ID NO: 2624 - DNA, 644 bp, Artificial Sequence
  Synthetic polynucleotide encoding artificial human antibody VL chain
gtgacatccagatgacccagtctccatcctccctgtctgcatctgtaggagacagagtcaccatcacttgccgggcaagtcagggcattagaaatgatttaggctggtttcagcagaaaccagggaaagcccctaagcgcctcatctatgctgcatccaatttgccaagtggggtctcatcaaggttcagcggcagtggatctgggacagaattcactctcacaatcagcagcctgcagcctgaagattttgcaacgtattactgtctacagcataataattacccgttgacgttcggccaagggaccaaggtggaattcaaacgaactgtggctgcaccatctgtcttcatcttcccgccatctgatgagcagttgaaatctggaactgcctctgttgtgtgcctgctgaataacttctatcccagagaggccaaagtacagtggaaggtggataacgccctccaatcgggtaactcccaggagagtgtcacagagcaggacagcaaggacagcacctacagcctcagcagcaccctgacgctgagcaaagcagactacgagaaacacaaagtctacgcctgcgaagtcacccatcagggcctgagctcgcccgtcacaaagagcttcaacaggggagagtgt

SEQ ID NO: 2625 - DNA, 644 bp, Artificial Sequence
  Synthetic polynucleotide encoding artificial human antibody VL chain
gtgacatccagatgacccagtctccttccaccctgtctgcatctgtaggagacagagtcaccatcacttgccgggccagtcagagtattagtagctggttggcctggtatcagcagaaaccagggaaagcccctaagctcctgatctatgatgcctccagtttggaaagtggggtcccatcaaggttcagcggcagtggatctgggacagaattcactctcaccatcagcagcctgcagcctgatgattttgcaactttttactgccaacagtataatagttatccgtacacttttggccaggggaccaagctggagatcaaacgaactgtggctgcaccatctgtcttcatcttcccgccatctgatgagcagttgaaatctggaactgcctctgttgtgtgcctgctgaataacttctatcccagagaggccaaagtacagtggaaggtggataacgccctccaatcgggtaactcccaggagagtgtcacagagcaggacagcaaggacagcacctacagcctcagcagcaccctgacgctgagcaaagcagactacgagaaacacaaagtctacgcctgcgaagtcacccatcagggcctgagctcgcccgtcacaaagagcttcaacaggggagagtgt

SEQ ID NO: 2626 - DNA, 659 bp, Artificial Sequence
  Synthetic polynucleotide encoding artificial human antibody VL chain
gggatattgtgatgactcagtctccactctccctgcccgtcacccctggagagccggcctccatctcctgcaggtccagtcagagcctccttcatagtaatggattcaactatttggattggtacctgcagaagccagggcagtctccacagctcctgatttatttgggttctaatcgggcctccggggtccctgacaggttcagtggcagtggatcaggcacagattttacactgaagatcagcagagtggaggctgaggatgttggggtttattactgcatgcaagctctacagatcccccggacgttcggccaagggaccaaggtggaaatcaaacgaactgtggctgcaccatctgtcttcatcttcccgccatctgatgagcagttgaaatctggaactgcctctgttgtgtgcctgctgaataacttctatcccagagaggccaaagtacagtggaaggtggataacgccctccaatcgggtaactcccaggagagtgtcacagagcaggacagcaaggacagcacctacagcctcagcagcaccctgacgctgagcaaagcagactacgagaaacacaaagtctacgcctgcgaagtcacccatcagggcctgagctcgcccgtcacaaagagcttcaacaggggagagtgt

SEQ ID NO: 2627 - DNA, 636 bp, Artificial Sequence
  Synthetic polynucleotide encoding artificial human antibody VL chain
ccctatgagctgactcagccaccctcagtgtccgtgtccccaggacagacagccagcatcacctgctctggagataaattgggggataaatatgcttgctggtatcagcagaagccaggccagtcccctgtgctggtcatctatcaagatagcaagcggccctcagggatccctgagcgattctctggctccaactctgggaacacagccactctgaccatcagcgggacccaggctatggatgaggctgactattactgtcaggcgtgggacagcaacgtccatgtcttcggaactgggaccaaggtcaccgtcctaggtcagcccaaggccaaccccactgtcactctgttcccgccctcctctgaggagctccaagccaacaaggccacactagtgtgtctgatcagtgacttctacccgggagctgtgacagtggcctggaaggcagatggcagccccgtcaaggcgggagtggagaccaccaaaccctccaaacagagcaacaacaagtacgcggccagcagctacctgagcctgacgcccgagcagtggaagtcccacagaagctacagctgccaggtcacgcatgaagggagcaccgtggagaagacagtggcccctacagaatgttca

SEQ ID NO: 2628 - DNA, 642 bp, Artificial Sequence
  Synthetic polynucleotide encoding artificial human antibody VL chain
tcctatgagctgacacagccaccctcggtgtcagtgtccccaggacaaacggccaggatcacctgctctggagatgcattgccaaaaaaatatgctttttggtaccagcagaagtcaggccaggcccctgtgttggtcatctatgaggacagcaaacgaccctccgggatccctgagagattctctggctccagctcagggacaatggccaccttgactatcagtggggcccaggtggaggatgaatctgactactactgttactcaacagacagcagtggtaatgtctgggtgttcggcggagggaccaagctgaccgtcctaggtcagcccaaggctgccccctcggtcactctgttcccgccctcctctgaggagcttcaagccaacaaggccacactggtgtgtctcataagtgacttctacccgggagccgtgacagtggcctggaaggcagatagcagccccgtcaaggcgggagtggagaccaccacaccctccaaacaaagcaacaacaagtacgcggccagcagctacctgagcctgacgcctgagcagtggaagtcccacagaagctacagctgccaggtcacgcatgaagggagcaccgtggagaagacagtggcccctacagaatgttca

SEQ ID NO: 2629 - DNA, 645 bp, Artificial Sequence
  Synthetic polynucleotide encoding artificial human antibody VL chain
gtttcttctgagctgactcaggaccctgctgtgtctgtggccttgggacagacagtcaggatcacatgccaaggagacagcctcagaagctattatgcaagctggtaccagcagaagccaggacaggcccctgtacttgtcatctatggtaaaaacaaccggccctcagggatcccagaccgattctctggctccagctcaggaaacacagcttccttgaccatcactggggctcaggcggaagatgaggctgactattactgtaactcccgggacagcagtggtaacctttatgtcttcggaactgggaccaaggtcaccgtcctaggtcagcccaaggccaaccccactgtcactctgttcccgccctcctctgaggagctccaagccaacaaggccacactagtgtgtctgatcagtgacttctacccgggagctgtgacagtggcctggaaggcagatggcagccccgtcaaggcgggagtggagaccaccaaaccctccaaacagagcaacaacaagtacgcggccagcagctacctgagcctgacgcccgagcagtggaagtcccacagaagctacagctgccaggtcacgcatgaagggagcaccgtggagaagacagtggcccctacagaatgttca

SEQ ID NO: 2630 - DNA, 662 bp, Artificial Sequence
  Synthetic polynucleotide encoding artificial human antibody VL chain
gggacatcgcgatgacccagtctccagactccctggctgtgtctctgggcgagagggccaccatcaactgcaagtccagccagagtgttttatacagctccagcagtaagaactacttagcttggtaccagcagaaaccaggacagcctcctaagctgctcatttactgggcatctacccgggaatccggggtccctgaccgattcagtggcagcgggtctgggacagatttcactctcaccatcagcagcctgcaggctgaagatgtggcagtttattactgtcagcaatattatagtagtcctctcactttcggcggagggaccaaggtggagatcaaacgaactgtggctgcaccatctgtcttcatcttcccgccatctgatgagcagttgaaatctggaactgcctctgttgtgtgcctgctgaataacttctatcccagagaggccaaagtacagtggaaggtggataacgccctccaatcgggtaactcccaggagagtgtcacagagcaggacagcaaggacagcacctacagcctcagcagcaccctgacgctgagcaaagcagactacgagaaacacaaagtctacgcctgcgaagtcacccatcagggcctgagctcgcccgtcacaaagagcttcaacaggggagagtgt

SEQ ID NO: 2631 - DNA, 660 bp, Artificial Sequence
  Synthetic polynucleotide encoding artificial human antibody VL chain
gatattgtgatgactcagtctccactctccctgcccgtcacccctggagagccggcctccatctcctgcaggtctagtcagagcctcctgcatagcaatggatacaactatttggattggtacctgcagaagccagggcagtctccacagctcctgatctatttgggttctaatcgggcctccggggtccctgacaggttcagtggcagtgggtcaggcacagattttacactgaaaatcagcagagtggaggctgacgatgttggggtttattactgcatgcaagctctacaaactcccccgtacacttttggccaggggaccaagctggagatcaaacgaactgtggctgcaccatctgtcttcatcttcccgccatctgatgagcagttgaaatctggaactgcctctgttgtgtgcctgctgaataacttctatcccagagaggccaaagtacagtggaaggtggataacgccctccaatcgggtaactcccaggagagtgtcacagagcaggacagcaaggacagcacctacagcctcagcagcaccctgacgctgagcaaagcagactacgagaaacacaaagtctacgcctgcgaagtcacccatcagggcctgagctcgcccgtcacaaagagcttcaacaggggagagtgt

SEQ ID NO: 2632 - DNA, 648 bp, Artificial Sequence
  Synthetic polynucleotide encoding artificial human antibody VL chain
gcctctgccctgactcagcctgcctccgtgtctgggtctcctggacagtcgatcaccatctcctgcactggaaccagcagtgacgttggtggttataactatgtctcctggtaccaacagcacccaggcaaagccccccaactcatgatttttgacgtcagtaatcggccctcaggggtttctaatcgcttctctggctccaagtctggcgacacggcctccctgaccatctctgggctccaggctgaggacgaggctgattattactgcagctcatatacaagcagcagcacttgggtgttcggcggagggaccaagctgaccgtcctcggtcagcccaaggctgccccctcggtcactctgttcccaccctcctctgaggagcttcaagccaacaaggccacactggtgtgtctcataagtgacttctacccgggagccgtgacagtggcctggaaggcagatagcagccccgtcaaggcgggagtggagaccaccacaccctccaaacaaagcaacaacaagtacgcggccagcagctacctgagcctgacgcctgagcagtggaagtcccacaaaagctacagctgccaggtcacgcatgaagggagcaccgtggagaagacagtggcccctacagaatgttca

SEQ ID NO: 2633 - DNA, 662 bp, Artificial Sequence
  Synthetic polynucleotide encoding artificial human antibody VL chain
gggacatcgtgatgacccagtctccagactccctggctgtgtctctgggcgagagggccaccatcaactgcaagtccagccagagtgttttatacagctccaacaataagaactacttaggttggtaccagcagaaaccaggagagcctcctaagctggtcattcactgggcatctacccgggaatccggggtccctgaccgattcagtggcagcgggtctgggacagatttcactctgaccatcagcagcctgcaggctgaagatgtggcagtttattactgtcagcaaagttacagtactccgtacacctttggccaggggaccaagctggagatcaaacgaactgtggctgcaccatctgtcttcatcttcccgccatctgatgagcagttgaaatctggaactgcctctgttgtgtgcctgctgaataacttctatcccagagaggccaaagtacagtggaaggtggataacgccctccaatcgggtaactcccaggagagtgtcacagagcaggacagcaaggacagcacctacagcctcagcagcaccctgacgctgagcaaagcagactacgagaaacacaaagtctacgcctgcgaagtcacccatcagggcctgagctcgcccgtcacaaagagcttcaacaggggagagtgt

SEQ ID NO: 2634 - DNA, 334 bp, Artificial Sequence
  Synthetic polynucleotide encoding artificial human antibody VL chain
cagtctgccctgactcagcctgcctccgtgtctgggtctcctggacagtcgatcaccatctcctgcactggaaccagcagtgatgttgggagttataaccttgtctcctggtaccaacagcacccaggcaaagcccccaaactcatgatttatgagggcagtaagcggccctcaggggtttctaatcgcttctctggctccaagtctggcaacacggcctccctgacaatctctgggctccaggctgaggacgaggctgattattactgctgctcatatgcaggtagtagcactccttgggtgttcggcggagggaccaagctgaccgtcctag

SEQ ID NO: 2635 - DNA, 642 bp, Artificial Sequence
  Synthetic polynucleotide encoding artificial human antibody VL chain
ccctatgagctgacacagccaccctcggtgtcactgtccccaggacaaacggccaggatcacctgctctggagatgctttgccaaaaaaatatgcttactggtaccagcagaagtcaggccaggcccctgtactggtcatctatgaggacagcaaacgaccctccgggatccctgagagattctctggctccagctcagggacaacggccaccttgactatcagtggggcccaggtggacgatgaaggtgactactactgttactcaccagacagcagtggtaatgtttgggtgttcggcggagggaccaagctgaccgtcctaggtcagcccaaggctgccccctcggtcactctgttcccaccctcctctgaggagcttcaagccaacaaggccacactggtgtgtctcataagtgacttctacccgggagccgtgacagtggcctggaaggcagatagcagccccgtcaaggcgggagtggagaccaccacaccctccaaacaaagcaacaacaagtacgcggccagcagctacctgagcctgacgcctgagcagtggaagtcccacaaaagctacagctgccaggtcacgcatgaagggagcaccgtggagaagacagtggcccctacagaatgttca

SEQ ID NO: 2636 - DNA, 310 bp, Artificial Sequence
  Synthetic polynucleotide encoding artificial human antibody VL chain
gaaatagtgatgacgcagtctccagccaccctgtctgtgtctccaggggaaagagccaccctctcctgcagggccagtcagagtgttagcagcaacttagcctggtaccagcagaaacctggccaggctcccaggctcctcatctatggtgcatccaccagggccactggtctcccagccaggttcagtggcagtgggtctgggacagagttcactctcaccatcagcagcctgcagtctgaagattttgcagtttattactgtcagtcccggggcactttcggcggagggaccaaggtggagatcaaac

SEQ ID NO: 2637 - DNA, 329 bp, Artificial Sequence
  Synthetic polynucleotide encoding artificial human antibody VL chain
gaaattgtgttgacgcagtctccagtcaccctgtctttgtctccaggggaaagagccaccctctcctgcagggccagtcagagtgttagcagcagctacatagcctggtaccagcagaaacctggccaggctcccaggctcctcatctatggtgcatccaccagggccactggcatcccagacaggttcagtggcagtgggtctgggacagacttcactctcaccatcagcagactggagcctgaagattgtgcagtgttttactgtcagcagtatggtagctcacattacacttttggccaggggaccaagctggagatcaaacgaac

SEQ ID NO: 2638 - DNA, 645 bp, Artificial Sequence
  Synthetic polynucleotide encoding artificial human antibody VL chain
tcctatgtgctgactcagccaccctcagtgtcagtggccccaggaaagacggccaggattacctgtgggggagacaacattggaagtagaagtgtccactggtaccagcagaagccaggccaggcccctgtgctggtcatctattatgatagcgaccggccctcagggatccctgagcgattctctggctccaactctggcaacacggccaccctgaccatcagcagggtcgaagccggggatgaggccgactattactgtcaggtgtgggatagtagtagtgatcatccttgggtgttcggcggagggaccaagctgaccgtcctacgtcagcccaaggctgccccctcggtcactctgttcccgccctcctctgaggagcttcaagccaacaaggccacactggtgtgtctcataagtgacttctacccgggagccgtgacagtggcctggaaggcagatagcagccccgtcaaggcgggagtggagaccaccacaccctccaaacaaagcaacaacaagtacgcggccagcagctacctgagcctgacgcctgagcagtggaagtcccacaaaagctacagctgccaggtcacgcatgaagggagcaccgtggagaagacagtggcccctacagaatgttca

SEQ ID NO: 2639 - DNA, 334 bp, Artificial Sequence
  Synthetic polynucleotide encoding artificial human antibody VL chain
cagtctgccctgactcagcctgcctccgtgtctgggtctcctggacagtcgatcaccatctcctgcactggcaccagcagtgatattgggacttataaccttgtctcctggtaccaacaacgcccaggcaaagcccccaaactcatcatttatgacgtcattaagcggccctcagggatttctgatcgcttctctggctccaagtctgacaacatggcctccctgacaatctctggcctccaggctgaggacgaggctcactattactgctgctcgtatagaagtagtacggctcccgtggtcttcggcggggggaccaaggtgaccgtcctag

SEQ ID NO: 2640 - DNA, 340 bp, Artificial Sequence
  Synthetic polynucleotide encoding artificial human antibody VL chain
ggcatcgtgatgacccagtctccagactccctggctgtgtctctgggcgagagggccaccatcaactgcaagtccagccagagtgttttatccacctccaacaataagaactacttagcttggtaccagcagaaaccaggacagcctcctaagctgctcatttactgggcatctacccgggaatccggggtccctgaccgattcagtggcagcgggtctgggacagatttcactctcaccatcagcagcctgcaggctgaagatgtggcagtttattactgtcagcaatattttagtactccgtggacgttcggccaagggaccaaggtggaaatcaaac

SEQ ID NO: 2641 - DNA, 642 bp, Artificial Sequence
  Synthetic polynucleotide encoding artificial human antibody VL chain
tcctatgtgctgactcagccaccctcggtgtcagtggccccaggacagacggccaggattacctgtgggggaaacaacattggaagtaaaagtgtgcactggtaccaacagaagccaggccaggcccctgtgctggtcgtctatgatgatagcgaccggccctcagggatccctgagcgattctctggctccaactctggaaacacggccaccctgaccatcagcagggtcgaagccggggatgaggccgactattactgtcaggtgtgggatggttatagtgatccattggtattcggcggagggaccaagctgaccgtcctaggtcagcccaaggctgccccctcggtcactctgttcccaccctcctctgaggagcttcaagccaacaaggccacactggtgtgtctcataagtgacttctacccgggagccgtgacagtggcctggaaggcagatagcagccccgtcaaggcgggagtggagaccaccacaccctccaaacaaagcaacaacaagtacgcggccagcagctacctgagcctgacgcctgagcagtggaagtcccacaaaagctacagctgccaggtcacgcatgaagggagcaccgtggagaagacagtggcccctacagaatgttca

SEQ ID NO: 2642 - DNA, 642 bp, Artificial Sequence
  Synthetic polynucleotide encoding artificial human antibody VL chain
gaggtccagatgacccagtctccatcctccctgtctgcatctgttggcgacagagtcaccatcacttgccgggcaagtcagcacattgccgggcgtctaaattggtatcagcagaaaccagggaaagccccaaaactcctgatccatagtgcatccagtgtgcaaagagaggtcccatcaaggttcggtggcagtggatttgggacagatttcactctcaccatctacagtctgcaagctgaagattttgcaacttacttctgtcaacagagttactatacccctcccactttcgccggagggaccagggtggatttgaaacgaactgtggctgcaccatctgtcttcatcttcccgccatctgatgagcagttgaaatctggaactgcctctgttgtgtgcctgctgaataacttctatcccagagaggccaaagtacagtggaaggtggataacgccctccaatcgggtaactcccaggagagtgtcacagagcaggacagcaaggacagcacctacagcctcagcagcaccctgacgctgagcaaagcagactacgagaaacacaaagtctacgcctgcgaagtcacccatcagggcctgagctcgcccgtcacaaagagcttcaacaggggagagtgt

SEQ ID NO: 2643 - DNA, 651 bp, Artificial Sequence
  Synthetic polynucleotide encoding artificial human antibody VL chain
cggtctgtgctgactcagccaccctcagcgtctgggacccccgggcagagggtcaccatctcttgttctggaagcagctccaacatcggaagtaatactgtaaactggtaccagcagctcccaggaacggcccccaaactcctcatctatagtaataatcagcggccctcaggggtccctgaccgattctctggctccaagtctggcacctcagcctccctggccatcagtgggctccagtctgaggatgaggctgattattactgtgcagcatgggatgacagcctgaatgggctttgggtgttcggcggagggaccaagctgaccgtcctaggtcagcccaaggctgccccctcggtcactctgttcccgccctcctctgaggagcttcaagccaacaaggccacactggtgtgtctcataagtgacttctacccgggagccgtgacagtggcctggaaggcagatagcagccccgtcaaggcgggagtggagaccaccacaccctccaaacaaagcaacaacaagtacgcggccagcagctacctgagcctgacgcctgagcagtggaagtcccacaaaagctacagctgccaggtcacgcatgaagggagcaccgtggagaagacagtggcccctacagaatgttca

SEQ ID NO: 2644 - DNA, 651 bp, Artificial Sequence
  Synthetic polynucleotide encoding artificial human antibody VL chain
gattttctgctgactcagccccactctgtgtcggagtctccggggaagacggtaaccatctcctgcacccgcagcagtggcagcattgccagcaactatgtgcagtggtaccagcagcgcccgggcagttccccctccactgtgatctatgaagatcaccaaagaccctctggggtccctggtcggttctctggctccatcgacagctcctccaactctgcctccctcaccatctctggactgaagactgaggacgaggctgactacttctgtcagtcttctgacagcaacaatcatgtggtcttcggcggagggaccaagctgaccgtcctaggtcagcccaaggctgccccctcggtcactctgttcccgccctcctctgaggagcttcaagccaacaaggccacactggtgtgtctcataagtgacttctacccgggagccgtgacagtggcctggaaggcagatagcagccccgtcaaggcgggagtggagaccaccacaccctccaaacaaagcaacaacaagtacgcggccagcagctacctgagcctgacgcctgagcagtggaagtcccacagaagctacagctgccaggtcacgcatgaagggagcaccgtggagaagacagtggcccctacagaatgttca

SEQ ID NO: 2645 - DNA, 651 bp, Artificial Sequence
  Synthetic polynucleotide encoding artificial human antibody VL chain
cggtctgtgctgacgcagccgccctcagtgtctggggccccagggcagagggtcaccatctcctgcactgggagcagctccaacatcggggcacattatgatgtacactggtaccagcagcttccaggaacagcccccaaactcctcatctatggtaacagcaatcggccctcaggggtccctgaccgattctctggctccaagtctggcacctcagcctccctggccatcactgggctccaggctgaggatgaggctgattattactgccagtcctatgacagcagcctgagtggtgtgctattcggcggagggaccaaactgaccgtcctaggtcagcccaaggctgccccctcggtcactctgttcccgccctcctctgaggagcttcaagccaacaaggccacactggtgtgtctcataagtgacttctacccgggagccgtgacagtggcctggaaggcagatagcagccccgtcaaggcgggagtggagaccaccacaccctccaaacaaagcaacaacaagtacgcggccagcagctatctgagcctgacgcctgagcagtggaagtcccacagaagctacagctgccaggtcacgcatgaagggagcaccgtggagaagacagtggcccctacagaatgttca

SEQ ID NO: 2646 - DNA, 642 bp, Artificial Sequence
  Synthetic polynucleotide encoding artificial human antibody VL chain
gacatccagatgacccagtctccatcctccctgtctgcatctgtgggagacagagtcaccatcacttgccgggcaagtcagagcattagtagttatttaaattggtatcagcagaaaccagggaaagcccctaagttcctgatctatgctgcatccagtttgcaaagtggggtcccatcaaggttcagtggcagtggatctgggacagatttcactctcaccatcagcagtctgcaacctgaagattttgcaacttactactgtcaacagagttacagtacccccttcactttcggccctgggaccaaagtggatctcaaacgaactgtggctgcaccatctgtcttcatcttcccgccatctgatgagcagttgaaatctggaactgcctctgttgtgtgcctgctgaataacttctatcccagagaggccaaagtacagtggaaggtggataacgccctccaatcgggtaactcccaggagagtgtcacagagcaggacagcaaggacagcacctacagcctcagcagcaccctgacgctgagcaaagcagactacgagaaacacaaagtctacgcctgcgaagtcacccatcagggcctgagctcgcccgtcacaaagagcttcaacaggggagagtgt

SEQ ID NO: 2647 - DNA, 642 bp, Artificial Sequence
  Synthetic polynucleotide encoding artificial human antibody VL chain
gacatccagatgacccagtctccaccctccctgtctgcatctgtgggagacagagtcaccatcacttgccaggcgagtcaggacattagcaactatttaaattggtatcagcagaaaccagggaaaacccctaagctcctgatctacgctgcatccactttggaaacaggggtcccatcaaggttcagtggaagtggatctgggacagattttactttcaccatcaacagcctgcagcctgaagatattgcaacatattactgtcaacagtatgatagtctccctctcactttcggcggagggaccaaggtggagatcaaacgaactgtggctgcaccatctgtcttcatcttcccgccatctgatgagcagttgaaatctggaactgcctctgttgtgtgcctgctgaataacttctatcccagagaggccaaagtacagtggaaggtggataacgccctccaatcgggtaactcccaggagagtgtcacagagcaggacagcaaggacagcacctacagcctcagcagcaccctgacgctgagcaaagcagactacgagaaacacaaagtctacgcctgcgaagtcacccatcagggcctgagctcgcccgtcacaaagagcttcaacaggggagagtgt

SEQ ID NO: 2648 - DNA, 650 bp, Artificial Sequence
  Synthetic polynucleotide encoding artificial human antibody VL chain
gagaaattgtgttgacgcagtctccaggcaccctgtctttgtctccagggcatagagccaccctctcctgcagggccagtcaagatgttgccagcacctacttagcctggtaccagcagaaacctggccaggctcccaggctcctcatctatggtgcatccagcagggccactggcatcccagacaggttcagtggcagtgggtctgggacagacttcactctcaccatcagcagactggagcctgaagattttgcagtgttttattgtcagtactatggtggctcaccgggattcactttcggccctgggaccaaagtggatttcaaacgaactgtggctgcaccatctgtcttcatcttcccgccatctgatgagcagttgaaatctggaactgcctctgttgtgtgcctgctgaataacttctatcccagagaggccaaagtacagtggaaggtggataacgccctccaatcgggtaactcccaggagagtgtcacagagcaggacagcaaggacagcacctacagcctcagcagcaccctgacgctgagcaaagcagactacgagaaacacaaagtctacgcctgcgaagtcacccatcagggcctgagctcgcccgtcacaaagagcttcaacaggggagagtgt

SEQ ID NO: 2649 - DNA, 648 bp, Artificial Sequence
  Synthetic polynucleotide encoding artificial human antibody VL chain
cagtctgccctgactcagcctgcctccgtgtctgggtctcctggacagtcgatcaccatctcctgcactggaaccaccagtgatgttgggacttataaccttgtctcctggtaccaacaactcccaggcaaagcccccaaactcattatttatgaggtcactaagcggccctcaggagtttctaatcgcttctctgcctccaagtctggcagcacggcctccctgacaatctctgggctccaggctgaggacgaggctgattattactgctgctcatatgcaggtagtagcacttatgtcttcggaagtggggccagggtcaccgtcctaggtcagcccaaggccaaccccactgtcactctgttcccgccctcctctgaggagctccaagccaacaaggccacactagtgtgtctgatcagtgacttctacccgggagctgtgacagtggcctggaaggcagatggcagccccgtcaaggcgggagtggagaccaccaaaccctccaaacagagcaacaacaagtacgcggccagcagctacctgagcctgacgcccgagcagtggaagtcccacagaagctacagctgccaggtcacgcatgaagggagcaccgtggagaagacagtggcccctacagaatgttca

SEQ ID NO: 2650 - DNA, 650 bp, Artificial Sequence
  Synthetic polynucleotide encoding artificial human antibody VL chain
gagaaattgtgttgacgcagtctccaggcaccctgtctttgtctccaggggaaacagccaccctctcctgcagggccagtcagagtgttgccaacaactacttagcctggcatcagcagaagcctggccaggctcccagactcctcatctatggtgcatccaaaagggccgctggcatcccagaccggttcagtggcagtgggtctgggacagagttcactctcaccatcagcagactggagcctgaagattgtgcagtgtattactgtcaggagtatgttaaatcacctggattcgctttcggccctgggaccagagtggatatcaaacgaactgtggctgcaccatctgtcttcatcttcccgccatctgatgagcagttgaaatctggaactgcctctgttgtgtgcctgctgaataacttctatcccagagaggccaaagtacagtggaaggtggataacgccctccaatcgggtaactcccaggagagtgtcacagagcaggacagcaaggacagcacctacagcctcagcagcaccctgacgctgagcaaagcagactacgagaaacacaaagtctacgcctgcgaagtcacccatcagggcctgagctcgcccgtcacaaagagcttcaacaggggagagtgt

SEQ ID NO: 2651 - DNA, 645 bp, Artificial Sequence
  Synthetic polynucleotide encoding artificial human antibody VL chain
gaaattgtgttgacgcagtctccagccaccctgtctttgtctccaggggaaagagccaccctctcctgcagggccagtcagagtgttagcagcaactacttagcctggtaccagcagaaacctggccaggctcccaggctcctcatccatggtgcatccagcagggccactggcttcccagacagattcagtggcagtgggtctgggacagacttcactctcaccatcaacagactggagcctgaagattttgcagtgtattattgtcagcagtatggtacttcacctcagacgttcggccaagggaccaaggtggaaatcaaacgaactgtggctgcaccatctgtcttcatcttcccgccatctgatgagcagttgaaatctggaactgcctctgttgtgtgcctgctgaataacttctatcccagagaggccaaagtacagtggaaggtggataacgccctccaatcgggtaactcccaggagagtgtcacagagcaggacagcaaggacagcacctacagcctcagcagcaccctgacgctgagcaaagcagactacgagaaacacaaagtctacgcctgcgaagtcacccatcagggcctgagctcgcccgtcacaaagagcttcaacaggggagagtgt

SEQ ID NO: 2652 - DNA, 650 bp, Artificial Sequence
  Synthetic polynucleotide encoding artificial human antibody VL chain
ctcagactgtggtgacccaggagccatcgttctcagtgtcccctggagggacagtcacattcacttgtgcctggagttctggttcagtctccactagtttctacaccagctggtaccgccagaccccaggccaggctccacaaacgctcatctacaacacaaatcgtcgttcttctggggtccctgatcgcttctctggctccatccttgggaacaaagctgccctcaccatcacgggggcccaggcagatgatgactctgattattattgtatgttgtatatgggtagtggcatttcgctcttcggcggagggaccaagctgaccgtcctaggtcagcccaaggctgccccctcggtcactctgttcccgccctcctctgaggagcttcaagccaacaaggccacactggtgtgtctcataagtgacttctacccgggagccgtgacagtggcctggaaggcagatagcagccccgtcaaggcgggagtggagaccaccacaccctccaaacaaagcaacaacaagtacgcggccagcagctatctgagcctgacgcctgagcagtggaagtcccacagaagctacagctgccaggtcacgcatgaagggagcaccgtggagaagacagtggcccctacagaatgttca

SEQ ID NO: 2653 - DNA, 654 bp, Artificial Sequence
  Synthetic polynucleotide encoding artificial human antibody VL chain
cagtctgtgctgacgcagccgccctcagtgtctggggccccagggcagagggtcaccatctcctgcactgggagcagctccaacatcggggcacaatatgatgtacactggtacaaggtaattccaggaacagcccccaaactcctcatctatggtaacgacaatcggccctcaggggtccctgaccgattctctggctccaagtctggcacctcagcctccctggccatcactgggctccaatctgaggatgaggctgattattactgccagtccaatgacatcagcctgagtggttctgtggtatttggcggagggactaagctgaccgtcctaggtcagcccaaggctgccccctcggtcactctgttcccgccctcctctgaggagcttcaagccaacaaggccacactggtgtgtctcataagtgacttctacccgggagccgtgacagtggcctggaaggcagatagcagccccgtcaaggcgggagtggagaccaccacaccctccaaacaaagcaacaacaagtacgcggccagcagctatctgagcctgacgcctgagcagtggaagtcccacagaagctacagctgccaggtcacgcatgaagggagcaccgtggagaagacagtggcccctacagaatgttca

SEQ ID NO: 2654 - DNA, 651 bp, Artificial Sequence
  Synthetic polynucleotide encoding artificial human antibody VL chain
ccgtctgtactgacgcagccgccctcagtgtctggggccccagggcagagggtcaccatctcctgcactgggagcagctccaacatcggggcaggttacgatgtacactggtaccaacagcttccaggaacagcccccaaactcctcatctatgctaacaccaatcgaccctcaggggtccctgaccgattctctggctccaagtctggcacctcagcctccctggccatcactgggctccaggctgaagatgaggctgattattactgccaatcctatgacaatagcctgagtgggggggtgttcggcggagggaccaagctgaccgtcctaggtcagcccaaggctgccccctcggtcactctgttcccgccctcctctgaggagcttcaagccaacaaggccacactggtgtgtctcataagtgacttctacccgggagccgtgacagtggcctggaaggcagatagcagccccgtcaaggcgggagtggagaccaccacaccctccaaacaaagcaacaacaagtacgcggccagcagctatctgagcctgacgcctgagcagtggaagtcccacagaagctacagctgccaggtcacgcatgaagggagcaccgtggagaagacagtggcccctacagaatgttca

SEQ ID NO: 2655 - DNA, 647 bp, Artificial Sequence
  Synthetic polynucleotide encoding artificial human antibody VL chain
gaaaaattgtgttgacgcagtctcccggcaccctgtctttgtctccaggggaaagggccaccctctcctgcagggccagtcagagtgttagcagcagttacttagcctggtaccagcagagacctggccagtctcccaggctcctcatctatgagacttccaccagggccactggcatcccagacaggttcagtggcagtgggtctgggacagacttcactctcaccatcagcggactggagcctgaagattttgcagtctattactgtcagcagtttgatatttcacccttcactttcggccctgggaccaaagtggatgtcaaacgaactgtggctgcaccatctgtcttcatcttcccgccatctgatgagcagttgaaatctggaactgcctctgttgtgtgcctgctgaataacttctatcccagagaggccaaagtacagtggaaggtggataacgccctccaatcgggtaactcccaggagagtgtcacagagcaggacagcaaggacagcacctacagcctcagcagcaccctgacgctgagcaaagcagactacgagaaacacaaagtctacgcctgcgaagtcacccatcagggcctgagctcgcccgtcacaaagagcttcaacaggggagagtgt

SEQ ID NO: 2656 - DNA, 648 bp, Artificial Sequence
  Synthetic polynucleotide encoding artificial human antibody VL chain
cagtctgccctgactcagcctgcctccgtgtctgggtctcctggacagtcgatcaccatctcctgcactggaaccagcagtgacgttggtggttataactatgtctcctggtaccaacaacacccaggcaaagcccccaaactcatgatttatgatgtcagtaatcggccctcaggggtttctaatcgcttctctggctccaagtctggcaacacggcctccctgaccatctctgggctccaggctgaggacgaggctgattattactgcagctcatatacaagcagcagctccttggtgttcggcggagggaccaaggtgaccgtcctaggtcagcccaaggctgccccctcggtcactctgttcccgccctcctctgaggagcttcaagccaacaaggccacactggtgtgtctcataagtgacttctacccgggagccgtgacagtggcctggaaggcagatagcagccccgtcaaggcgggagtggagaccaccacaccctccaaacaaagcaacaacaagtacgcggccagcagctacctgagcctgacgcctgagcagtggaagtcccacaaaagctacagctgccaggtcacgcatgaagggagcaccgtggagaagacagtggcccctacagaatgttca

SEQ ID NO: 2657 - DNA, 331 bp, Artificial Sequence
  Synthetic polynucleotide encoding artificial human antibody VL chain
cagtctgccctgactcagcctgcctccgtgtctggctctcctgggcagtcgatcaccatctcctgcactggaaccagcagtgatattgggggttatgaccttgtctcctggtaccaacaccacccaggcaaagcccccaaactcgtgatttctgagggcagtaagcggccctcaggggtttctaatcgcttctttggctccaagtctggcaacacggcctccctgacaatctctggcctccaggctgaggacgaggctgattattactgctgctcatttacaggtactagcacttttgtcttcggaactgggaccaaggtcaccgtcctag

SEQ ID NO: 2658 - DNA, 340 bp, Artificial Sequence
  Synthetic polynucleotide encoding artificial human antibody VL chain
gacatcgtgatgacccagtctccagactccctggctgtgtctctgggcgagagggccaccatcaactgcaagtccagccagagtgttttatacagctccaacaataagaactacttagcttggtaccagcagaaaccaggacagcctcctaagctgctcatttactgggcatctacccgggaatccggggtccctgaccgattcagtggcagcgggtctgggacagacttcactctcaccatcagcagcctagagcctgaagattttgcagtttattactgtcagcaatattatagtactccgtacacttttggccaggggaccaagctggagatcaaac

SEQ ID NO: 2659 - DNA, 648 bp, Artificial Sequence
  Synthetic polynucleotide encoding artificial human antibody VL chain
cagtctgtgctgactcagccaccctcagcgtctgggacccccgggcagagggtcaccatctcttgttctggaagcagctccaacatcggaagtaatactgttaactggtaccagcagttcccaggaacggcccccaaactcctcatctacagtaataatcaccggcccttaggggtccctgaccgattctctggctccaagtctggcacctcagcctccctggccatcagtgaggtccgctctgaggatgaggctgattattattgtgcaacatgggatgacagcctgaatggaggggtgttcggcgcagggaccaagctgaccgtcgtaggtcagcccaaggctgccccctcggtcactctgttcccgccctcctctgaggagcttcaagccaacaaggccacactggtgtgtctcataagtgacttctacccgggagccgtgacagtggcctggaaggcagatagcagccccgtcaaggcgggagtggagaccaccacaccctccaaacaaagcaacaacaagtacgcggccagcagctacctgagcctgacgcctgagcagtggaagtcccacagaagctacagctgccaggtcacgcatgaagggagcaccgtggagaagacagtggcccctacagaatgttca

SEQ ID NO: 2660 - DNA, 645 bp, Artificial Sequence
  Synthetic polynucleotide encoding artificial human antibody VL chain
ccagctgtggtgactcaggagccctcactgactgtgtccccaggagggacagtcactctcacctgtggctccagcactggagtagtcaccactggtcattatccctactggttccagcagaagcctggccaagcccccacgacactgatttttgatacaagcaacaaacactcctggacccctgcccgcttctcaggctccctccttgggggcaaagctgccctgaccctttctgctgcgcagcctgaagatgaggctgactattactgctggctcatctctggtggtgcccctgtattcggcggagggaccaagctgaccgtcctaggtcagcccaaggctgccccctcggtcactctgttcccgccctcctctgaggagcttcaagccaacaaggccacactggtgtgtctcataagtgacttctacccgggagccgtgacagtggcctggaaggcagatagcagccccgtcaaggcgggagtggagaccaccacaccctccaaacaaagcaacaacaagtacgcggccagcagctatctgagcctgacgcctgagcagtggaagtcccacagaagctacagctgccaggtcacgcatgaagggagcaccgtggagaagacagtggcccctacagaatgttca

SEQ ID NO: 2661 - DNA, 334 bp, Artificial Sequence
  Synthetic polynucleotide encoding artificial human antibody VL chain
cagtctgtgctgacgcagccgccctcagtgtctggggccccagggcagagagtcaccatctcctgcgctgggagctactccaacatcggggcaggttatgatgtacactggtaccgccaacttccaggaacagcccccacactcctcatctatagtaacaacaatcggccctcaggggtctctgaccgattctctggctccaaatctggcacctcagcctccctggccatcactgggctccaggctgaggatgaggctgattattactgccagtcctttgacagcagcctgagtcgttctgtcttcggaactgggaccaaggtcaccgtcctag

SEQ ID NO: 2662 - DNA, 324 bp, Artificial Sequence
  Synthetic polynucleotide encoding artificial human antibody VL chain
gagaaattgtattgacacagtctccagccaccctgtctttctctccaggggacagagccaccctctcctgcagggccagtcagaatattaacaggttcttagcctggtatcaacagaaaccgggccagactcccaggctcctcatctatgatgcatccactcgggccactggcatccctgcccggttcagtggcagtgggtctgggacagacttcagtctcatcatcagcagcctagagcctgaagattttgcgatttattactgccagcagcgtaacaactggcctatcactttcggccctgggaccaaagtggatgtcaaac

SEQ ID NO: 2663 - DNA, 642 bp, Artificial Sequence
  Synthetic polynucleotide encoding artificial human antibody VL chain
gccatccaaatgacccagtctccatcctccctgtctgcatctgtaggagacagagtcaccatcacttgccgggcaagtcagggcattagaaatgatttaggctggtatcagcagaaaccagggaaagcccctaagctcctgatctatgctgcatccagtttacaaagtggggtcccatcaaggttcagcggcagtggatctggcacagatttcactctcaccatcagcagcctgcagcctgaagattttgcaacttattactgtctacaagattacaattaccctccgacgttcggccaagggaccaaggtggaaatcaaacgaactgtggctgcaccatctgtcttcatcttcccgccatctgatgagcagttgaaatctggaactgcctctgttgtgtgcctgctgaataacttctatcccagagaggccaaagtacagtggaaggtggataacgccctccaatcgggtaactcccaggagagtgtcacagagcaggacagcaaggacagcacctacagcctcagcagcaccctgacgctgagcaaagcagactacgagaaacacaaactctacgcctgcgaagtcacccatcagggcctgagctcgcccgtcacaaagagcttcaacaggggagagtgt

SEQ ID NO: 2664 - DNA, 324 bp, Artificial Sequence
  Synthetic polynucleotide encoding artificial human antibody VL chain
tcttctgagctgactcaggaccctgctgtgtctgtggccttgggacagacagtcaggatcacatgccaaggagacagcctcagaacggattatgcaacctggtaccaacagaagccaggacaggcccctatacttgtcttctatggtgaggacaaccggccctcagggatcccagaccgattctctggctccagctcaggaaacacagcttcgttgaccatcactggggctcaggcggaagatgaggctgactattactgtaactcccgggacagcagcggtcaccattgggtgttcggcggagggaccaaactgaccgtccta

SEQ ID NO: 2665 - DNA, 342 bp, Artificial Sequence
  Synthetic polynucleotide encoding artificial human antibody VL chain
gggacatcgtgatgacccagtctccggactccctggccgtgtctctgggcgagagggccaccctcaactgcaagtccagccagagtgttttatccagctacaacaataaggactacttagcttggttccagcagaaaccaggacagcctcctcagttgctcttttactgggcatctacccggaaaaccggagtccctgaccgattcagtggcagcgggtctgggactgatttcactctcaccatcagcagcctgcagactgaagatgtggcagtttattactgtcagcaatattattctactccatacacttttggccaggggaccaagctggagatcaaac

SEQ ID NO: 2666 - DNA, 660 bp, Artificial Sequence
  Synthetic polynucleotide encoding artificial human antibody VL chain
gatgttgtgatgactcagtctccactctccctgcccgttacccttggacaggcggcctccatctcctgcaggtctagtcaaagcctcgtatacagtgatggaaacacctacttgaattggtttcagcagaggcccggccaatctccaaggcgcctaatttataaggtttctaaccgggagtctggggtcccagacagattcagcggcagtgggtcaggcactgatttcacactgcaaatcagcagggtggaggctgaggatgttgggatttattactgcatgcaaggtgcacactggcctccaatcaccttcggccaagggacacgactggagattaaacgaactgtggctgcaccatctgtcttcatcttcccgccatctgatgagcagttgaaatctggaactgcctctgttgtgtgcctgctgaataacttctatcccagagaggccaaagtacagtggaaggtggataacgccctccaatcgggtaactcccaggagagtgtcacagagcaggacagcaaggacagcacctacagcctcagcagcaccctgacgctgagcaaagcagactacgagaaacacaaagtctacgcctgcgaagtcacccatcagggcctgagctcgcccgtcacaaagagcttcaacaggggagagtgt

SEQ ID NO: 2667 - DNA, 322 bp, Artificial Sequence
  Synthetic polynucleotide encoding artificial human antibody VL chain
tcctatgagctgacacagccaccctcggtgtcagtgtccccaggacaaacggccaggatcacctgctctggagatgcattgccaaaaaaatatgttttttggtaccagcagaggtcaggccaggcccctgtgttagtcatctatgaagacagtaaacgaccctccgggatccctgacagattctctggctccagctcagggacactggccaccctcactatcagtggcgcccaggtggaggatgaggctgactactactgttactcaacagacactattggaaattgggtgttcggcggagggaccaggctgaccgtcctag

SEQ ID NO: 2668 - DNA, 642 bp, Artificial Sequence
  Synthetic polynucleotide encoding artificial human antibody VL chain
ctctatgtgctgactcagccaccctcggtgtcagtggccccaggacagacggccaggattacctgtgggggaaacaacattggaagtaaaagtgtgcactggtaccagcagaagccaggccaggcccctgtgctggtcgtctatgatgatagcgaccggccctcagggatccctgagcgattctctggctccaactctgggaacacggccaccctgaccatcagcagggtcgaagccggggatgaggccgactattactgtcaggtgtgggatagtagtagtgatcattggattttcggcggagggaccaagctgaccgtcctaggtcagcccaaggctgccccctcggtcactctgttcccaccctcctctgaggagcttcaagccaacaaggccacactggtgtgtctcataagtgacttctacccgggagccgtgacagtggcctggaaggcagatagcagccccgtcaaggcgggagtggagaccaccacaccctccaaacaaagcaacaacaagtacgcggccagcagctacctgagcctgacgcctgagcagtggaagtcccacaaaagctacagctgccaggtcacgcatgaagggagcaccgtggagaagacagtggcccctacagaatgttca

SEQ ID NO: 2669 - DNA, 644 bp, Artificial Sequence
  Synthetic polynucleotide encoding artificial human antibody VL chain
gtgacatccagatgacccagtctccatcctccctgtctgcatctgttggagacagagtcaccatcacttgccgggcaagtcagagcattagcacctatttaaattggtatcagcagaaaccagggaaagcccctaagctcctgatctatgctgcttccaatttgcagagtggggtcccatcaacgttcagtggcagtggatctgggacagatttcactctcaccatcagcagtctgcaacctgaagattttgcaacttactactgtcaacagagttacagtccccctctcactttcggcggggggaccacggtggagatcaaacgaactgtggctgcaccatctgtcttcatcttcccgccatctgatgagcagttgaaatctggaactgcctctgttgtgtgcctgctgaataacttctatcccagagaggccaaagtacagtggaaggtggataacgccctccaatcgggtaactcccaggagagtgtcacagagcaggacagcaaggacagcacctacagcctcagcagcaccctgacgctgagcaaagcagactacgagaaacacaaagtctacgcctgcgaagtcacccatcagggcctgagctcgcccgtcacaaagagcttcaacaggggagagtgt

SEQ ID NO: 2670 - DNA, 645 bp, Artificial Sequence
  Synthetic polynucleotide encoding artificial human antibody VL chain
gaaatagtgatgacgcagtctccagccaccctgtctgtgtctcagggggaaagagccaccctctcctgcagggccagtcagagtgttggcagcgacttagcctggtaccagcagaaacctggccaggctcccaggctcctcatctatgatgcttccgccagggccactgatatcccagccaggttcagtggcagtgggtctgagacagagttcactctcaccatcagcagcctgcagtctgaagattttgcagtttattactgtcagcattatagtgactggcgagcactcactttcggcggagggaccaaggtggagatcaaacgaactgtggctgcaccatctgtcttcatcttcccgccatctgatgagcagttgaaatctggaactgcctctgttgtgtgcctgctgaataacttctatcccagagaggccaaagtacagtggaaggtggataacgccctccaatcgggtaactcccaggagagtgtcacagagcaggacagcaaggacagcacctacagcctcagcagcaccctgacgctgagcaaagcagactacgagaaacacaaagtctacgcctgcgaagtcacccatcagggcctgagctcgcccgtcacaaagagcttcaacaggggagagtgt

SEQ ID NO: 2671 - DNA, 660 bp, Artificial Sequence
  Synthetic polynucleotide encoding artificial human antibody VL chain
ggcatcgtgatgacccagtctccagactccctggctgtgtctctgggcgagagggccaccatcaactgcaggtccagccagagtgttttatacagctccaacaataagaactacttagcttggtaccagcagaaaccaggacagcctcctaagctgctcatttactgggcatctacccgggaatccggggtccctgaccgattcagtggcagcgggtctgggacagatttcactctcaccatcagcagcctgcaggctgaagatgtggcagtctattactgtcaacaatattatggtcctctgtggacgttcggccaagggaccagggtggaaatcagacgaactgtggctgcaccatctgtcttcatcttcccgccatctgatgagcagttgaaatctggaactgcctctgttgtgtgcctgctgaataacttctatcccagagaggccaaagtacagtggaaggtggataacgccctccaatcgggtaactcccaggagagtgtcacagagcaggacagcaaggacagcacctacagcctcagcagcaccctgacgctgagcaaagcagactacgagaaacacaaagtctacgcctgcgaagtcacccatcagggcctgagctcgcccgtcacaaagagcttcaacaggggagagtgt

SEQ ID NO: 2672 - DNA, 642 bp, Artificial Sequence
  Synthetic polynucleotide encoding artificial human antibody VL chain
tccgatgagctgacacagccaccctcggtgtcagtgtccccaggacagacggccaggatcacctgctctggagatgcattggcaaaggaatatgcttattggtaccagcaaaagtcaggccaggcccctgtattggtgatctctaaagacacggagaggccctcagggatccctgcgcgattttctggctccagttcagggacaacagtcacgttgaccatcagtggagtccagtctgatgacgaggctgactattactgtcaatcagcagacagcagtcttacttattggctcttcggcggagggaccaagctgaccgtcctacgtcagcccaaggctgccccctcggtcactctgttcccgccctcctctgaggagcttcaagccaacaaggccacactggtgtgtctcataagtgacttctacccgggagccgtgacagtggcctggaaggcagatagcagccccgtcaaggcgggagtggagaccaccacaccctccaaacaaagcaacaacaagtacgcggccagcagctacctgagcctgacgcctgagcagtggaagtcccacaaaagctacagctgccaggtcacgcatgaagggagcaccgtggagaagacagtggcccctacagaatgttca

SEQ ID NO: 2673 - DNA, 319 bp, Artificial Sequence
  Synthetic polynucleotide encoding artificial human antibody VL chain
gacatccagatgacccaggctccttccaccctgtctgcatctgttggagacagagtcagcatcacttgccgggccagtcagaatattcgcgacttcttggcctggtatcagcagaaaccagggagagcccctgacctcctcatctatcgggcatctactttagaaaaaggggtgtcggcgaggttcagcggcagtgggtctgggacagaattcactctaaccatcaccggcctgcagcctgatgattttgcaacatattactgccaacaatattccgattactccactttcggcggagggaccagggtggagatcaaac

SEQ ID NO: 2674 - DNA, 660 bp, Artificial Sequence
  Synthetic polynucleotide encoding artificial human antibody VL chain
gacatcgtgatgacccagtctccagactccctggctgtgtctctgggcgagagggccaccatcacctgcaagtccagccagactattttatacagctccaacaataagaactatttagcttggtaccagcagaaaccaggacagcctcctaaactactcatttactgggcatctacccgggaatccggggtccctgaccggttcagtggcagcgggtctgggacagatttcactctcaccatcagcagcctgcaggctgaagatgtggcagtttattactgtcaccaatattatactactcctttcactttcggccctgggaccactgtggatatcagacgaactgtggctgcaccatctgtcttcatcttcccgccatctgatgagcagttgaaatctggaactgcctctgttgtgtgcctgctgaataacttctatcccagagaggccaaagtacagtggaaggtggataacgccctccaatcgggtaactcccaggagagtgtcacagagcaggacagcaaggacagcacctacagcctcagcagcaccctgacgctgagcaaagcagactacgagaaacacaaagtctacgcctgcgaagtcacccatcagggcctgagctcgcccgtcacaaagagcttcaacaggggagagtgt

SEQ ID NO: 2675 - DNA, 636 bp, Artificial Sequence
  Synthetic polynucleotide encoding artificial human antibody VL chain
tcctatgagctgactcagccaccctcagtgtccgtgtccccaggacagacagccagcatcacctgctctggagataaattggggaataaatatgtttgctggtatcagcagaagccaggccagtcccctgtgttggtcatctatcaggataccaagcggccctcagggatccctgagcgattctctggctccaagtctgggaacacagccactctgaccatcagcgggacccaggctctggatgaggctgactattactgtcaggcgtgggacagcagcactgcagaattcggcggagggaccaagctgaccgtcctaggtcagcccaaggctgccccctcggtcactctgttcccgccctcctctgaggagcttcaagccaacaaggccacactggtgtgtctcataagtgacttctacccgggagccgtgacagtggcctggaaggcagatagcagccccgtcaaggcgggagtggagaccaccacaccctccaaacaaagcaacaacaagtacgcggccagcagctatctgagcctgacgcctgagcagtggaagtcccacagaagctacagctgccaggtcacgcatgaagggagcaccgtggagaagacagtggcccctacagaatgttca

SEQ ID NO: 2676 - DNA, 648 bp, Artificial Sequence
  Synthetic polynucleotide encoding artificial human antibody VL chain
cggtctgtgctgactcagccaccctcagcgtctgggactcccgggcagacggtcaccatctcttgttctggtagcaggtccaacatcgggagtaattttgtgtattggtaccaacacctcccaggatcggcccccaaaacgaccatccattctaatactcagcggccccccggggtccctgatcgattttctggctccaagtctggcacctcagcctccctggccatcagtgggctccggtctgaagatgaggctgattattactgtgtgacatgggatgacgacctgcatggttgggtgttcggcggagggaccaggctgaccgtcctaggtcagcccaaggctgccccctcggtcactctgttcccgccctcctctgaggagcttcaagccaacaaggccacactggtgtgtctcataagtgacttctacccgggagccgtgacagtggcctggaaggcagatagcagccccgtcaaggcgggagtggagaccaccacaccctccaaacaaagcaacaacaagtacgcggccagcagctacctgagcctgacgcctgagcagtggaagtcccacaaaagctacagctgccaggtcacgcatgaagggagcaccgtggagaagacagtggcccctacagaatgttca

SEQ ID NO: 2677 - DNA, 654 bp, Artificial Sequence
  Synthetic polynucleotide encoding artificial human antibody VL chain
cggtctgtgttgacgcagccgccctcagtgtctgcggccccaggacagaaggtcatcatctcctgctctggaagcagctccaacattgggaataactatgtttcctggtaccagcaattcctaggaacagcccccaaactcctcatttatgacactgataagcgaccctcagggattcctgaccgattctctggctccaagtctggcacgtcagccaccctgggcattaccgggctccagactggggacgaggcccattattactgcgcaacgtgggatagcagcctgcgtgctggccctgtagtattcggcggagggacgaaattgaccgtcctaggtcagcccaaggctgccccctcggtcactctgttcccgccctcctctgaggagcttcaagccaacaaggccacactggtgtgtctcataagtgacttctacccgggagccgtgacagtggcctggaaggcagatagcagccccgtcaaggcgggagtggagaccaccacaccctccaaacaaagcaacaacaaatacgcggccagcagctatctgagcctgacgcctgagcagtggaagtcccacagaagctacagctgccaggtcacgcatgaagggagcaccgtggagaagacagtggcccctacagaatgttca

SEQ ID NO: 2678 - DNA, 642 bp, Artificial Sequence
  Synthetic polynucleotide encoding artificial human antibody VL chain
gacatccagatgacccaatctccttccaccctgtctgcatctgtaggagacagagtcaccatcacttgccgggccagccagagtgttagtttctggttggcctggtatcagcagaaaccagggaaagcccctaacctcctgatcagtaaggcgtctactttagaaagtggagtcccctcaagatttagcggcagtggctctgggacagaattcactctcaccatcagcagcctgcagcctgatgatttcgcaacttattactgccaacagtacaatgcttacccggtcactttcggcggggggaccaaggtggagatcagacgaactgtggctgcaccatctgtcttcatcttcccgccatctgatgagcagttgaaatctggaactgcctctgttgtgtgcctgctgaataacttctatcccagagaggccaaagtacagtggaaggtggataacgccctccaatcgggtaactcccaggagagtgtcacagagcaggacagcaaggacagcacctacagcctcagcagcaccctgacgctgagcaaagcagactacgagaaacacaaagtctacgcctgcgaagtcacccatcagggcctgagctcgcccgtcacaaagagcttcaacaggggagagtgt

SEQ ID NO: 2679 - DNA, 660 bp, Artificial Sequence
  Synthetic polynucleotide encoding artificial human antibody VL chain
ggcatcgtgatgatccagtctccagactccctggctgtgtctctgggcgagagggccaccatcaactgcaagtccagccagagtgtcttctacagctccaacaataagaactacttagcttggtaccagcagaaaccaggacagcctcctaaactgctcatttactgggcatctacccgggaatccggggtccctgaccgattcagtggcagcgggtctgggacagatttcactctcaccctcaccagcctgcaggctgaagatgtggcagtttattactgtcaacaatattatagtactccgtggacgttcggccaagggaccaaggtggaaatcaaacgaactgtggctgcaccatctgtcttcatcttcccgccatctgatgagcagttgaaatctggaactgcctctgttgtgtgcctgctgaataacttctatcccagagaggccaaagtacagtggaaggtggataacgccctccaatcgggtaactcccaggagagtgtcacagagcaggacagcaaggacagcacctacagcctcagcagcaccctgacgctgagcaaagcagactacgagaaacacaaagtctacgcctgcgaagtcacccatcagggcctgagctcgcccgtcacaaagagcttcaacaggggagagtgt

SEQ ID NO: 2680 - DNA, 662 bp, Artificial Sequence
  Synthetic polynucleotide encoding artificial human antibody VL chain
gggacatcgtgatgacccagtctccagactccctggctgtgtctctgggcgagagggccgccatcaactgcaagtccagccagagtgttttatacagctccaacaataagaactacttagcttggtaccagcagagaccaggacagcctcctaagctgctcattcactgggcatctatgcgggaatccggggtccctgaccgattcagtggcagcgggtctgggacagatttcactctcaccatcagcagcctgcaggctgaagatgtggcaatttattactgtcagcaatattatagtcctcctctcactttcggcggagggaccaaggtggagatcaaacgaactgtggctgcaccatctgtcttcatcttcccgccatctgatgagcagttgaaatctggaactgcctctgttgtgtgcctgctgaataacttctatcccagagaggccaaagtacagtggaaggtggataacgccctccaatcgggtaactcccaggagagtgtcacagagcaggacagcaaggacagcacctacagcctcagcagcaccctgacgctgagcaaagcagactacgagaaacacaaagtctacgcctgcgaagtcacccatcagggcctgagctcgcccgtcacaaagagcttcaacaggggagagtgt

SEQ ID NO: 2681 - DNA, 330 bp, Artificial Sequence
  Synthetic polynucleotide encoding artificial human antibody VL chain
cagtctgccctgactcagcctgcctccgtgtctgggtctcctggacagtcgatcaccatctcttgcactggaagcagcaatgacattggtcgttataagtatgtctcctggttccaacatcacccaggcagagcccccaaactcataatttatgaggtcaataatcggccctcagggctttctcatcgcttctctggctccaagtctggcaacacggcctccctgaccatctctgggctccaggctgaggacgaggctgattattactgctgctcatatacaagcagcctcacttatgtcttcggaactgggaccgcggtcaccgtccta

SEQ ID NO: 2682 - DNA, 657 bp, Artificial Sequence
  Synthetic polynucleotide encoding artificial human antibody VL chain
gatgttgtgatgactcagtctccactctccctgcccgtcacccttggacagccggcctccatctcctgcaggtctagtcaaagcctcgtatacagtgatggaaacacctacttgaattggtttcagcagaggccaggccaatctccaaggcgcctaatttataaggtttctaaccgggactctggggtcccagacagattcagcggcagtgggtcaggcactgatttcacactgaaaatcagcagggtggaggctgaggatgttggggtttattactgcatgcaaggtacacactggccgtacacttttggccaggggaccaagctggagatcaaacgaactgtggctgcaccatctgtcttcatcttcccgccatctgatgagcagttgaaatctggaactgcctctgttgtgtgcctgctgaataacttctatcccagagaggccaaagtacagtggaaggtggataacgccctccaatcgggtaactcccaggagagtgtcacagagcaggacagcaaggacagcacctacagcctcagcagcaccctgacgctgagcaaagcagactacgagaaacacaaagtctacgcctgcgaagtcacccatcagggcctgagctcgcccgtcacaaagagcttcaacaggggagagtgt

SEQ ID NO: 2683 - DNA, 636 bp, Artificial Sequence
  Synthetic polynucleotide encoding artificial human antibody VL chain
ccctatgagctgactcagccaccctcagtgtccgtgtccccaggacagacagccagcatcacctgctctggagataaattgggggataaatatgcttgctggtatcagcagaagccaggccagtcccctgtgctggtcatctatcaagatagcaagcggccctcagggatccctgagcgattctctggctccaactctgggaacacagccactctgaccatcagcgggacccaggctatggatgaggctgactattactgtcaggcgtgggacagcagcacttatgtcttcggaactgggaccaaggtcaccgtcctaggtcagcccaaggccaaccccactgtcactctgttcccgccctcctctgaggagctccaagccaacaaggccacactagtgtgtctgatcagtgacttctacccgggagctgtgacagtggcctggaaggcagatggcagccccgtcaaggcgggagtggagaccaccaaaccctccaaacagagcaacaacaagtacgcggccagcagctacctgagcctgacgcccgagcagtggaagtcccacagaagctacagctgccaggtcacgcatgaagggagcaccgtggagaagacagtggcccctacagaatgttca

SEQ ID NO: 2684 - DNA, 648 bp, Artificial Sequence
  Synthetic polynucleotide encoding artificial human antibody VL chain
gaaaatgtgttgacgcagtctccaggcaccctgtctttgtctccaggggaaagagccaccctctcctgcagggccagtcagagggttaacagcaactacttagcctggtaccagcagaaatctggccaggctcccaggctcctcatctatggtgcatccagcagggccactggtatcccagacaggttcagtggcagtgggtctgggacagacttcactctcaccatcagcagactggagcctgaagattttgcagtgtattactgtcagcagtatggtggctcacctctattcactttcggccctgggaccaaagtggatatcaaacgaactgtggctgcaccatctgtcttcatcttcccgccatctgatgagcagttgaaatctggaactgcctctgttgtgtgcctgctgaataacttctatcccagagaggccaaagtacagtggaaggtggataacgccctccaatcgggtaactcccaggagagtgtcacagagcaggacagcaaggacagcacctacagcctcagcagcaccctgacgctgagcaaagcagactacgagaaacacaaactctacgcctgcgaagtcacccatcagggcctgagctcgcccgtcacaaagagcttcaacaggggagagtgt

SEQ ID NO: 2685 - DNA, 319 bp, Artificial Sequence
  Synthetic polynucleotide encoding artificial human antibody VL chain
ccctatgaactgactcagccaccctcagtgtccgtgtccccaggacagacagccagcatcgcctgctctggagataatttgggaaataaatatgcttggtggtatcgacagaagccaggccagtcccctgtcctggtcatgtataaagataacaagcggccctcagggatccctgagcgattctctggctccaactctgggaacacagccactctgaccatcagcgggacccaggctatggatgaggctgactattactgtcagacgtgggacagcagcactgtgatattcggcggagggaccaagctgaccgtccaag

SEQ ID NO: 2686 - DNA, 659 bp, Artificial Sequence
  Synthetic polynucleotide encoding artificial human antibody VL chain
gggatattgtgatgactcagtctccactctccctgcccgtcacccctggagagccggcctccatctcctgcaggtctagtcagagcctcctgcatagtaatggatacaactatttggattggtacctgcagaagccagggcagtctccacagctcctgatctatttgggttctaatcgggcctccggggtccctgacaggttcagtggcagtggatcaggcacagattttacactgaaaatcagcagagtggaggctgaggatgttggggtttattactgcatgcaagctctacaaactccgtacacttttggccaggggaccaagctggagatcaaacgaactgtggctgcaccatctgtcttcatcttcccgccatctgatgagcagttgaaatctggaactgcctctgttgtgtgcctgctgaataacttctatcccagagaggccaaagtacagtggaaggtggataacgccctccaatcgggtaactcccaggagagtgtcacagagcaggacagcaaggacagcacctacagcctcagcagcaccctgacgctgagcaaagcagactacgagaaacacaaagtctacgcctgcgaagtcacccatcagggcctgagctcgcccgtcacaaagagcttcaacaggggagagtgt

SEQ ID NO: 2687 - DNA, 648 bp, Artificial Sequence
  Synthetic polynucleotide encoding artificial human antibody VL chain
cagtctgtgttgacgcagccgccctcagtgtctgcggccccaggacagaaggtcaccatctcctgctctggaagcagctccaacattgggaataattatgtatcctggtaccagcagctcccaggaacagcccccaaactcctcatttatgacaataataagcgaccctcagggattcctgaccgattctctggctccaagtctggcacgtcagccaccctgggcatcaccggactccagactggggacgaggccgattattactgcggaacatgggatagcagtctgagtgctggcgtcttcggaactgggaccaaggtcaccgtcctaggtcagcccaaggccaaccccactgtcactctgttcccgccctcctctgaggagctccaagccaacaaggccacactagtgtgtctgatcagtgacttctacccgggagccgtgacagtggcctggaaggcagatagcagccccgtcaaggcgggagtggagaccaccacaccctccaaacaaagcaacaacaagtacgcggccagcagctacctgagcctgacgcctgagcagtggaagtcccacagaagctacagctgccaggtcacgcatgaagggagcaccgtggagaagacagtggcccctacagaatgttca

SEQ ID NO: 2688 - DNA, 641 bp, Artificial Sequence
  Synthetic polynucleotide encoding artificial human antibody VL chain
gtgacatccagatgacccagtctccttccaccctgtctgcatctgtaggagacagagtcaccatcacttgccgggccagtcagagtattagtagctggttggcctggtatcagcagaaaccagggaaagcccctaagctcctgatctataaggcgtctagtttagaaagtggggtcccatcaaggttcagcggcagtggatctgggacagaattcactctcaccatcagcagcctgcagcctgatgattttgcaacttattactgccaacagtataatagttattggacgttcggccaagggaccaaggtggaaatcaaacgaactgtggctgcaccatctgtcttcatcttcccgccatctgatgagcagttgaaatctggaactgcctctgttgtgtgcctgctgaataacttctatcccagagaggccaaagtacagtggaaggtggataacgccctccaatcgggtaactcccaggagagtgtcacagagcaggacagcaaggacagcacctacagcctcagcagcaccctgacgctgagcaaagcagactacgagaaacacaaagtctacgcctgcgaagtcacccatcagggcctgagctcgcccgtcacaaagagcttcaacaggggagagtgt

SEQ ID NO: 2689 - DNA, 644 bp, Artificial Sequence
  Synthetic polynucleotide encoding artificial human antibody VL chain
gtgacatccagatgacccagtctccttccaccctgtctgcatctgtaggagacagagtcaccatcacttgccgggccagtcagagtattagtagctggttggcctggtatcagcagaaaccagggaaagcccctaagctcctgatctataaggcgtctagtttagaaagtggggtcccatcaaggttcagcggcagtggatctgggacagaattcactctcaccatcagcagcctgcagcctgatgattttgcaacttattactgccaacagtataatagttatccgtggacgttcggccaagggaccaaggtggaaatcaaacgaactgtggctgcaccatctgtcttcatcttcccgccatctgatgagcagttgaaatctggaactgcctctgttgtgtgcctgctgaataacttctatcccagagaggccaaagtacagtggaaggtggataacgccctccaatcgggtaactcccaggagagtgtcacagagcaggacagcaaggacagcacctacagcctcagcagcaccctgacgctgagcaaagcagactacgagaaacacaaagtctacgcctgcgaagtcacccatcagggcctgagctcgcccgtcacaaagagcttcaacaggggagagtgt

SEQ ID NO: 2690 - DNA, 654 bp, Artificial Sequence
  Synthetic polynucleotide encoding artificial human antibody VL chain
ccagctgtgctgacgcagccgccctcagtgtctggggccccagggcagagggtcaccatctcctgcactgggagcagctccaacatcggggcaggttatgatgtacactggtaccagcagcttccaggaacagcccccaaactcctcatctatggtaacagcaatcggccctcaggggtccctgaccgattctctggctccaagtctggcacctcagcctccctggccatcactgggctccaggctgaggatgaggctgattattactgccagtcctatgacagcagcctgagtggttcaggggtgttcggcggagggaccaagctgaccgtcctaggtcagcccaaggctgccccctcggtcactctgttcccaccctcctctgaggagcttcaagccaacaaggccacactggtgtgtctcataagtgacttctacccgggagccgtgacagtggcctggaaggcagatagcagccccgtcaaggcgggagtggagaccaccacaccctccaaacaaagcaacaacaagtacgcggccagcagctacctgagcctgacgcctgagcagtggaagtcccacaaaagctacagctgccaggtcacgcatgaagggagcaccgtggagaagacagtggcccctacagaatgttca

SEQ ID NO: 2691 - DNA, 639 bp, Artificial Sequence
  Synthetic polynucleotide encoding artificial human antibody VL chain
tcctatgagctgacacagccaccctcggtgtcagtgtccccaggacagacggccaggatcacctgctctggagatgcattgccaaagcaatatgcttattggtaccagcagaagccaggccaggcccctgtgttggtgatatataaagacagtgagaggccctcagggatccctgagcgattctctggctccagctcagggacaacagtcacgttgaccatcagtggagtccaggcagaagacgaggctgactattactgtcaatcagcagacagcagtggtacttatgtcttcggaactgggaccaaggtcaccgtcctaggtcagcccaaggccaaccccactgtcactctgttcccgccctcctctgaggagctccaagccaacaaggccacactagtgtgtctgatcagtgacttctacccgggagctgtgacagtggcctggaaggcagatggcagccccgtcaaggcgggagtggagaccaccaaaccctccaaacagagcaacaacaagtacgcggccagcagctacctgagcctgacgcccgagcagtggaagtcccacagaagctacagctgccaggtcacgcatgaagggagcaccgtggagaagacagtggcccctacagaatgttca

SEQ ID NO: 2692 - DNA, 308 bp, Artificial Sequence
  Synthetic polynucleotide encoding artificial human antibody VL chain
gacatccagatgacccagtctccatcttccctgtctgcatctgtcggagacagagtcaccttcacttgtcgggcgagtcagaatattcgcaacaatttagcctggtatcagctcaaaccagggaaagccccgcagctcctgatctattctgcttccagtttggagactggggtcccttcaaggttcagcggctctggatctggaacagatttcactctcgccatcagcagcctgcagcctgaagattttgcgacttactattgtcaacaggctcacggtttcccaatcacttttgggcaggggagcaa

SEQ ID NO: 2693 - DNA, 319 bp, Artificial Sequence
  Synthetic polynucleotide encoding artificial human antibody VL chain
gaaatagtgatgacgcagtctccagccaccctgtctgtgtctcccggggaaagagccaccctctcctgcagggccagtcagagtgttagcagcaacttagcctggtaccagcagaaacctggccaggctcccaggctcctcatctatggtgcatccaccagggccactggtatcccagccaggttcagtggcagtgggtctgggacagagttcactctcaccatcagcagcctgcagtctgaagattttgcaatttattactgtcagcagtataatagctggcccgctttcggcggagggaccaaggtggagatcaaac

SEQ ID NO: 2694 - DNA, 642 bp, Artificial Sequence
  Synthetic polynucleotide encoding artificial human antibody VL chain
gacatccagatgacccagtctccatcctccctgtctgcatctgtaggagacagagtcaccatcacttgccgggcaagtcagagcattagcagctatttaaattggtatcagcagaaaccagggaaagcccctaagctcctgatctatgctgcatccagtttgcaaagtggggtcccatcaaggttcagtggcagtggatctgggacagatttcactctcaccgtcagcagtctacaacctgaagactttgcaacttactactgtcaacagagttacaataccccgtacacttttggccaggggaccaagctggagatcaaacgaactgtggctgcaccatctgtcttcatcttcccgccatctgatgagcagttgaaatctggaactgcctctgttgtgtgcctgctgaataacttctatcccagagaggccaaagtacagtggaaggtggataacgccctccaatcgggtaactcccaggagagtgtcacagagcaggacagcaaggacagcacctacagcctcagcagcaccctgacgctgagcaaagcagactacgagaaacacaaagtctacgcctgcgaagtcacccatcagggcctgagctcgcccgtcacaaagagcttcaacaggggagagtgt

SEQ ID NO: 2695 - DNA, 644 bp, Artificial Sequence
  Synthetic polynucleotide encoding artificial human antibody VL chain
gtgacatccagatgacccagtctccatcctccctgtctgcatctgtaggagacagagtcaccatcacttgccgggcaagtcagagcattagcacctatttaaattggtatcagcagaaaccagggatggcccctaagctcctgatctatgctgcatccactttgcaaagtggggtcccatcaaggttcagtggcagtggatctgcgacagattacactctcaccatcagcagtctgcaacctgaagatttcgcgacttactactgtcaacagagttacaataccccgctcactttcggcggagggaccaaggtggacatcaaacgaactgtggctgcaccatctgtcttcatcttcccgccatctgatgagcagttgaaatctggaactgcctctgttgtgtgcctgctgaataacttctatcccagagaggccaaagtacagtggaaggtggataacgccctccaatcgggtaactcccaggagagtgtcacagagcaggacagcaaggacagcacctacagcctcagcagcaccctgacgctgagcaaagcagactacgagaaacacaaactctacgcctgcgaagtcacccatcagggcctgagctcgcccgtcacaaagagcttcaacaggggagagtgt

SEQ ID NO: 2696 - DNA, 648 bp, Artificial Sequence
  Synthetic polynucleotide encoding artificial human antibody VL chain
gaaattgtgttgacgcagtctccaggcaccctgtctttgtctccaggggaaagagccaccctctcctgcagggccagtcagagtgttaccagcagctacttagcctggtaccagcagaaacctggccaggctcccaggctcctcatctatggtgcatccagcagggccactggcatcccagacaggttcagtggcagtgggtctgggacagacttcactctcaccatcagcagactggagcctgaagattttgcagtgtattactgtcagcagtatggtagctcacctccgaacagttttggccaggggaccaagctggagatcaaacgaactgtggctgcaccatctgtcttcatcttcccgccatctgatgagcagttgaaatctggaactgcctctgttgtgtgcctgctgaataacttctatcccagagaggccaaagtacagtggaaggtggataacgccctccaatcgggtaactcccaggagagtgtcacagagcaggacagcaaggacagcacctacagcctcagcagcaccctgacgctgagcaaagcagactacgagaaacacaaagtctacgcctgcgaagtcacccatcagggcctgagctcgcccgtcacaaagagcttcaacaggggagagtgt

SEQ ID NO: 2697 - DNA, 325 bp, Artificial Sequence
  Synthetic polynucleotide encoding artificial human antibody VL chain
tcctatgtgctgactcagccaccctcagtgtcagtggccccaggaaagacggccaggattacctgtgggggaaacaacattggaagtaaaagtgtgcactggtaccagcagaagccaggccaggcccctgtgctggtcatctattatgatagagacaggccctcagggatccctgagcgattctctggctccaactctgggaacacggccaccctgaccatcagcagggtcgaagccggggatgaggccgactattactgtcaggtgtgggatagtagtagtgatcatccggtattcggcggagggaccaagctgaccgtcctag

SEQ ID NO: 2698 - DNA, 651 bp, Artificial Sequence
  Synthetic polynucleotide encoding artificial human antibody VL chain
aattttatgctgactcagccccactctgtgtcggagtctccggggaagacggtaaccatctcctgcacccgcagcagtggcagcattgccgacaagtatgtccactggtaccggcagcgcccgggcagctcccccaccattgtgatctatgaggataaacaaaggccctctggggtccctgatcgggtctctggcgccatcgacacctcctccaactctgcctccctcaccatctctggactgaagactgaggacgaggctgactactactgtcagtcttatgatagcaacactcattgggtgttcggcggagggaccaagctgaccgtcctaggtcagcccaaggctgccccctcggtcactctgttcccgccctcctctgaggagcttcaagccaacaaggccacactggtgtgtctcataagtgacttctacccgggagccgtgacagtggcctggaaggcagatagcagccccgtcaaggcgggagtggagaccaccacaccctccaaacaaagcaacaacaagtacgcggccagcagctacctgagcctgacgcctgagcagtggaagtcccacagaagctacagctgccaggtcacgcatgaagggagcaccgtggagaagacagtggcccctacagaatgttca

SEQ ID NO: 2699 - DNA, 657 bp, Artificial Sequence
  Synthetic polynucleotide encoding artificial human antibody VL chain
gatattgtgatgactcagtctccactctccctgcccgtcacccctggagagccggcctccatctcctgcaggtctagtcagagcctcctacatagtaatggatacaactatttggattggtacctgcagaagccagggcagtctccacagctcctgatctatttgggttctaatcgggcctccggggtccctgacaggttcagtggtagtggatcaggcacagattttacactgaaaatcagcagagtggaggctgaggatgttggggtttattactgcatgcaagctctagaaactcctcgcactttcggcggagggaccaaggtggagatcaaacgaactgtggctgcaccatctgtcttcatcttcccgccatctgatgagcagttgaaatctggaactgcctctgttgtgtgcctgctgaataacttctatcccagagaggccaaagtacagtggaaggtggataacgccctccaatcgggtaactcccaggagagtgtcacagagcaggacagcaaggacagcacctacagcctcagcagcaccctgacgctgagcaaagcagactacgagaaacacaaagtctacgcctgcgaagtcacccatcagggcctgagctcgcccgtcacaaagagcttcaacaggggagagtgt

SEQ ID NO: 2700 - DNA, 641 bp, Artificial Sequence
  Synthetic polynucleotide encoding artificial human antibody VL chain
gtgacatccagatgacccagtctccttccaccctgtctgcatctgtaggagacagagtcaccatcacttgccgggccagtcagagtattagtagctggttggcctggtatcagcagaaaccagggaaagcccctaagctcctgatctataaggcgtctagtttagaaagtggggtcccatcaaggttcagcggcagtggatctgggacagaattcactctcaccatcagcagcctgcagcctgatgattttgcaacttattactgccaacagtataatagttattcgacgttcggccaagggaccaaggtggaaatcaaacgaactgtggctgcaccatctgtcttcatcttcccgccatctgatgagcagttgaaatctggaactgcctctgttgtgtgcctgctgaataacttctatcccagagaggccaaagtacagtggaaggtggataacgccctccaatcgggtaactcccaggagagtgtcacagagcaggacagcaaggacagcacctacagcctcagcagcaccctgacgctgagcaaagcagactacgagaaacacaaagtctacgcctgcgaagtcacccatcagggcctgagctcgcccgtcacaaagagcttcaacaggggagagtgt

SEQ ID NO: 2701 - DNA, 657 bp, Artificial Sequence
  Synthetic polynucleotide encoding artificial human antibody VL chain
ggaattgcaatgactcagtctccacgctccctgcccgtcacccctggagagccggcctccatctcctgcaggtctagtcagagcctcctgtatcgtgatggagagcactatttggattggtacctacagaagccagggcagtctccacacctcctgatctactcgggatctaatcgggcctccggggtccctgacaggttcagtggcagtggatcaggcacagattttacactaataatcagcagagtggaggctgaggatgctggggtctattactgcatgcaagctctacaacctccgtacactttcggccaggggaccaagctggagatcacacgaactgtggctgcaccatctgtcttcatcttcccgccatctgatgagcagttgaaatctggaactgcctctgttgtgtgcctgctgaataacttctatcccagagaggccaaagtacagtggaaggtggataacgccctccaatcgggtaactcccaggagagtgtcacagagcaggacagcaaggacagcacctacagcctcagcagcaccctgacgctgagcaaagcagactacgagaaacacaaactctacgcctgcgaagtcacccatcagggcctgagctcgcccgtcacaaagagcttcaacaggggagagtgt

SEQ ID NO: 2702 - DNA, 647 bp, Artificial Sequence
  Synthetic polynucleotide encoding artificial human antibody VL chain
gtgacatccagatgacccagtctccatcctccctgcctgcatctgtaggagacagagtcaccatcacttgccgggcaagtcagagcattagtagctatttaaattggtatcaaaagaaaccagggaaagcccctaagctcctgatcgatgctgcatccagtttgcaaagtggggtcccatcaaggttcagtggcagtggatctgggacagatttcactctcaccatcagcagtctgcaacctgaagattttgcaacttactactgtcaacagagttacagtacccctccgtggacgttcggccaagggaccaaggtggaaatcaaacgaactgtggctgcaccatctgtcttcatcttcccgccatctgatgagcagttgaaatctggaactgcctctgttgtgtgcctgctgaataacttctatcccagagaggccaaagtacagtggaaggtggataacgccctccaatcgggtaactcccaggagagtgtcacagagcaggacagcaaggacagcacctacagcctcagcagcaccctgacgctgagcaaagcagactacgagaaacacaaagtctacgcctgcgaagtcacccatcagggcctgagctcgcccgtcacaaagagcttcaacaggggagagtgt

SEQ ID NO: 2703 - DNA, 660 bp, Artificial Sequence
  Synthetic polynucleotide encoding artificial human antibody VL chain
gacatcgtgatgacccagtctccagactccctgtctctgtctctgggcgagagggccaccatcaactgcaagtccagccagagtcttttatacagttccaactataagaactacttagcttggtaccaacagaaaccaggacagcctcctaaattgctcatttactgggcatctacccgggagtccggggtccctgaccgattcagtggcagcgggtctgggacagatttcactctcaccatcagcagcctgcaggctgaagatgtggcagtttattactgtcagcaatattatcttgttcccgtcaccttcggccaagggacacgactggacattaaacgaactgtggctgcaccatctgtcttcatcttcccgccatctgatgagcagttgaaatctggaactgcctctgttgtgtgcctgctgaataacttctatcccagagaggccaaagtacagtggaaggtggataacgccctccaatcgggtaactcccaggagagtgtcacagagcaggacagcaaggacagcacctacagcctcagcagcaccctgacgctgagcaaagcagactacgagaaacacaaagtctacgcctgcgaagtcacccatcagggcctgagctcgcccgtcacaaagagcttcaacaggggagagtgt

SEQ ID NO: 2704 - DNA, 651 bp, Artificial Sequence
  Synthetic polynucleotide encoding artificial human antibody VL chain
gcctctgtgctgactcagccaccctcagcgtctgggacccccgggcagagggtcaccatctcttgttctggaagcagctccaacatcggaagtaattatgtatactggtaccagcagctcccaggaacggcccccaaactcctcatctataggaataatcagcggccctcaggggtccctgaccgattctctggctccaagtctggcacctcagcctccctggccatcagtgggctccggtccgaggatgaggctgattattactgtgcagcatgggatgacagcctgagtggcccttatgtcttcggaactgggaccaaggtcaccgtcctaggtcagcccaaggccaaccccactgtcactctgttcccgccctcctctgaggagcttcaagccaacaaggccacactagtgtgtctgatcagtgacttctacccgggagctgtgacagtggcctggaaggcagatggcagccccgtcaaggcgggagtggagaccaccaaaccctccaaacagagcaacaacaagtacgcggccagcagctacctgagcctgacgcccgagcagtggaagtcccacagaagctacagctgccaggtcacgcatgaagggagcaccgtggagaagacagtggcccctacagaatgttca

SEQ ID NO: 2705 - DNA, 651 bp, Artificial Sequence
  Synthetic polynucleotide encoding artificial human antibody VL chain
cagtctgccctgactcagcctccctccgcgtccgggtctcctggacagtcagtcaccatctcctgcactggaaccagcagtgacgttggtggttataactatgtctcctggtaccaacagcacccaggcaaagcccccaaactcatgatttatgaggtcagtaagcggccctcaggggtccctgatcgcttctctggctccaagtctggcaacacggcctccctgaccgtctctgggctccaggctgaggatgaggctgattattactgcagctcatatgcaggcagcaacaatttttatgtcttcggaactgggaccaaggtcaccgtcctaggtcagcccaaggccaaccccactgtcactctgttcccgccctcctctgaggagctccaagccaacaaggccacactagtgtgtctgatcagtgacttctacccgggagctgtgacagtggcctggaaggcagatggcagccccgtcaaggcgggagtggagaccaccaaaccctccaaacagagcaacaacaagtacgcggccagcagctacctgagcctgacgcccgagcagtggaagtcccacagaagctacagctgccaggtcacgcatgaagggagcaccgtggagaagacagtggcccctacagaatgttca

SEQ ID NO: 2706 - DNA, 654 bp, Artificial Sequence
  Synthetic polynucleotide encoding artificial human antibody VL chain
cagtctgtgctgacgcagccgccctcagtgtctggggccccagggcagagggtcaccatctcctgcactgggagcaactccaacatcggggcaggttatgatgtacactggtatcagcagcttccaggagcagcccccaaactcctcatctatggtaacggcaatcggccctcaggggtccctgaccgattctctggctccaagtctgacacctcagcctccctggccatcactgggctccaggctgacgatgaggctgattattactgccagtcctatgacagcagcctgagtggttcaatgatattcggcggagggaccaagctgaccgtcctaggtcagcccaaggctgccccctcggtcactctgttcccgccctcctctgaggagcttcaagccaacaaggccacactggtgtgtctcataagtgacttctacccgggagccgtgacagtggcctggaaggcagatagcagccccgtcaaggcgggagtggagaccaccacaccctccaaacaaagcaacaacaagtacgcggccagcagctatctgagcctgacgcctgagcagtggaagtcccacagaagctacagctgccaggtcacgcatgaagggagcaccgtggagaagacagtggcccctacagaatgttca

SEQ ID NO: 2707 - DNA, 660 bp, Artificial Sequence
  Synthetic polynucleotide encoding artificial human antibody VL chain
ctccctgtgctgactcagccaccttcctcctccgcatctcctggagaatccgccagactcacctgcaccttgcccagtgacatcaatgttactaactacaacatatactggtaccagcagaagccagggagccctcccaggtatctcctgtaccagtactcagactcagataagggccaggtctctggagtccccagccgcttctctggatccaaagatgcttcagccaatacagggattttactcatctccgggctccagtctgaggatgaggctgactattactgtatgatttggtcaagccttgtggtattcggcggagggaccaagctgaccgtcctaggtcagcccaaggctgccccctcggtcactctgttcccgccctcctctgaggagcttcaagccaacaaggccacactggtgtgtctcataagtgacttctacccgggagccgtgacagtggcctggaaggcagatagcagccccgtcaaggcgggagtggagaccaccacaccctccaaacaaagcaacaacaagtacgcggccagcagctatctgagcctgacgcctgagcagtggaagtcccacagaagctacagctgccaggtcacgcatgaagggagcaccgtggagaagacagtggcccctacagaatgttca

SEQ ID NO: 2708 - DNA, 659 bp, Artificial Sequence
  Synthetic polynucleotide encoding artificial human antibody VL chain
gggatattgtgatgactcagtctccactctccctgcccgtcacccctggagagccggcctccatctcctgcaggtctagtcagagcctcctgcatagtgatggatacaactatttggattggttcctgcagaagccagggcagtctccacagctcctcatctatttgggttcttatcgggcctccggggtccctgacaggttcagtggcagtggctcaggcacagattttacactgaaaatcaccagagtggaggctgaggatgttggggtttattactgcatgcaagctctacaaactccgtggacgttcggccaagggaccaaggtggaaatcaaacgaactgtggctgcaccatctgtcttcatcttcccgccatctgatgagcagttgaaatctggaactgcctctgttgtgtgcctgctgaataacttctatcccagagaggccaaagtacagtggaaggtggataacgccctccaatcgggtaactcccaggagagtgtcacagagcaggacagcaaggacagcacctacagcctcagcagcaccctgacgctgagcaaagcagactacgagaaacacaaagtctacgcctgcgaagtcacccatcagggcctgagctcgcccgtcacaaagagcttcaacaggggagagtgt

SEQ ID NO: 2709 - DNA, 642 bp, Artificial Sequence
  Synthetic polynucleotide encoding artificial human antibody VL chain
gtcatccaaatgacccagtctccatcctccctgtctgcatctgtaggagacagagtcaccatcgcttgccgggcaagtcagggcattagaaatgatttaggctggtatcagcagaaaccagggagagcccctaaactcctgatctatgctgcatccactttacaaagtggggtcccatcaaggttcagcggcagtggatctggcacagatttcactctcaccatctacagcctgcagcctgaagattttgcaacttattactgtctacaaaattacaattacccttggacgttcggccaagggaccaaggtggagatccaaggaactgtggctgcaccatctgtcttcatcttcccgccatctgatgagcagttgaaatctggaactgcctctgttgtgtgcctgctgaataacttctatcccagagaggccaaagtacagtggaaggtggataacgccctccaatcgggtaactcccaggagagtgtcacagagcaggacagcaaggacagcacctacagcctcagcagcaccctgacgctgagcaaagcagactacgagaaacacaaagtctacgcctgcgaagtcacccatcagggcctgagctcgcccgtcacaaagagcttcaacaggggagagtgt

SEQ ID NO: 2710 - DNA, 659 bp, Artificial Sequence
  Synthetic polynucleotide encoding artificial human antibody VL chain
cggatattgtgatgacccagactccactctctctgtccgtcacccctggacagccggcctccatctcctgcaagtctagtcagagcctcctgcatagtgatggaaagacctatttgtattggtacctgcagaagccaggccagtctccacagctcctaatctatgaagtttccagccggttctctggagtgccagataggttcagtggcagcgggtcagggacagatttcacactgaaaatcagccgggtggaggctgaggatgttggggtttattactgcatgcaaggtatacaccttcctaggacttttggccaggggaccaagctggagatcaaacgaactgtggctgcaccatctgtcttcatcttcccgccatctgatgagcagttgaaatctggaactgcctctgttgtgtgcctgctgaataacttctatcccagagaggccaaagtacagtggaaggtggataacgccctccaatcgggtaactcccaggagagtgtcacagagcaggacagcaaggacagcacctacagcctcagcagcaccctgacgctgagcaaagcagactacgagaaacacaaagtctacgcctgcgaagtcacccatcagggcctgagctcgcccgtcacaaagagcttcaacaggggagagtgt

SEQ ID NO: 2711 - DNA, 24 bp, Artificial Sequence
  Synthetic polynucleotide encoding artificial human antibody CDR-H1 region
gaagtgacgttcaacacttatggc

SEQ ID NO: 2712 - DNA, 24 bp, Artificial Sequence
  Synthetic polynucleotide encoding artificial human antibody CDR-H1 region
ggattcacctttagtagctattgg

SEQ ID NO: 2713 - DNA, 24 bp, Artificial Sequence
  Synthetic polynucleotide encoding artificial human antibody CDR-H1 region
ggattcacctttgaagattatgcc

SEQ ID NO: 2714 - DNA, 30 bp, Artificial Sequence
  Synthetic polynucleotide encoding artificial human antibody CDR-H1 region
gggttctcactcagcactagtggagtgggt

SEQ ID NO: 2715 - DNA, 24 bp, Artificial Sequence
  Synthetic polynucleotide encoding artificial human antibody CDR-H1 region
ggatataccttcaccacctactat

SEQ ID NO: 2716 - DNA, 24 bp, Artificial Sequence
  Synthetic polynucleotide encoding artificial human antibody CDR-H1 region
ggattcgtctttgatgattatgcc

SEQ ID NO: 2717 - DNA, 24 bp, Artificial Sequence
  Synthetic polynucleotide encoding artificial human antibody CDR-H1 region
ggttacacctttaccaactatggt

SEQ ID NO: 2718 - DNA, 24 bp, Artificial Sequence
  Synthetic polynucleotide encoding artificial human antibody CDR-H1 region
ggattcacctttgatgattatgcc

SEQ ID NO: 2719 - DNA, 24 bp, Artificial Sequence
  Synthetic polynucleotide encoding artificial human antibody CDR-H1 region
ggattcacttttagttactatggc

SEQ ID NO: 2720 - DNA, 24 bp, Artificial Sequence
  Synthetic polynucleotide encoding artificial human antibody CDR-H1 region
ggattcccctttggtgattatgcc

SEQ ID NO: 2721 - DNA, 24 bp, Artificial Sequence
  Synthetic polynucleotide encoding artificial human antibody CDR-H1 region
ggttacatcgatatcaacaacggc

SEQ ID NO: 2722 - DNA, 24 bp, Artificial Sequence
  Synthetic polynucleotide encoding artificial human antibody CDR-H1 region
ggattcaccttcactcgccatggt

SEQ ID NO: 2723 - DNA, 24 bp, Artificial Sequence
  Synthetic polynucleotide encoding artificial human antibody CDR-H1 region
cgattcacctttagcagctatgcc

SEQ ID NO: 2724 - DNA, 30 bp, Artificial Sequence
  Synthetic polynucleotide encoding artificial human antibody CDR-H1 region
ggggacggtgtctctagcaacagtgctagt

SEQ ID NO: 2725 - DNA, 24 bp, Artificial Sequence
  Synthetic polynucleotide encoding artificial human antibody CDR-H1 region
ggattcgccttcagtagtaatggc

SEQ ID NO: 2726 - DNA, 24 bp, Artificial Sequence
  Synthetic polynucleotide encoding artificial human antibody CDR-H1 region
ggaatcaccttcagtagctatgac

SEQ ID NO: 2727 - DNA, 24 bp, Artificial Sequence
  Synthetic polynucleotide encoding artificial human antibody CDR-H1 region
ggttacaactttaccaactatggt

SEQ ID NO: 2728 - DNA, 24 bp, Artificial Sequence
  Synthetic polynucleotide encoding artificial human antibody CDR-H1 region
ggattcagcttcaggagttatgaa

SEQ ID NO: 2729 - DNA, 24 bp, Artificial Sequence
  Synthetic polynucleotide encoding artificial human antibody CDR-H1 region
ggatacatcttcactagctatgct

SEQ ID NO: 2730 - DNA, 27 bp, Artificial Sequence
  Synthetic polynucleotide encoding artificial human antibody CDR-H1 region
ggttacttaatcagtagtggctactac

SEQ ID NO: 2731 - DNA, 30 bp, Artificial Sequence
  Synthetic polynucleotide encoding artificial human antibody CDR-H1 region
gggttctcactcaacactagtggagtgggt

SEQ ID NO: 2732 - DNA, 24 bp, Artificial Sequence
  Synthetic polynucleotide encoding artificial human antibody CDR-H1 region
ggattcaccttcagcaactatagc

SEQ ID NO: 2733 - DNA, 24 bp, Artificial Sequence
  Synthetic polynucleotide encoding artificial human antibody CDR-H1 region
ggattcaccttcagtagctatagc

SEQ ID NO: 2734 - DNA, 24 bp, Artificial Sequence
  Synthetic polynucleotide encoding artificial human antibody CDR-H1 region
ggtgactccatgagtttttactat

SEQ ID NO: 2735 - DNA, 30 bp, Artificial Sequence
  Synthetic polynucleotide encoding artificial human antibody CDR-H1 region
ggtggctccatcagcagtggtagttactac

SEQ ID NO: 2736 - DNA, 24 bp, Artificial Sequence
  Synthetic polynucleotide encoding artificial human antibody CDR-H1 region
ggatttagtttcagtagttatagc

SEQ ID NO: 2737 - DNA, 30 bp, Artificial Sequence
  Synthetic polynucleotide encoding artificial human antibody CDR-H1 region
ggtggctccatcagcagaagtccttacttc

SEQ ID NO: 2738 - DNA, 24 bp, Artificial Sequence
  Synthetic polynucleotide encoding artificial human antibody CDR-H1 region
ggattcaccttcactagttatggc

SEQ ID NO: 2739 - DNA, 24 bp, Artificial Sequence
  Synthetic polynucleotide encoding artificial human antibody CDR-H1 region
agtggctccagtggtagttattac

SEQ ID NO: 2740 - DNA, 24 bp, Artificial Sequence
  Synthetic polynucleotide encoding artificial human antibody CDR-H1 region
ggatacaacttcagggactactat

SEQ ID NO: 2741 - DNA, 30 bp, Artificial Sequence
  Synthetic polynucleotide encoding artificial human antibody CDR-H1 region
ggtggctccatcaacagtggtgattaccac

SEQ ID NO: 2742 - DNA, 30 bp, Artificial Sequence
  Synthetic polynucleotide encoding artificial human antibody CDR-H1 region
ggtggctccatcagcagtagtggttactac

SEQ ID NO: 2743 - DNA, 24 bp, Artificial Sequence
  Synthetic polynucleotide encoding artificial human antibody CDR-H1 region
ggattcaccttcagtagctatggc

SEQ ID NO: 2744 - DNA, 30 bp, Artificial Sequence
  Synthetic polynucleotide encoding artificial human antibody CDR-H1 region
gggttctcactcaccactagtggagtgggt

SEQ ID NO: 2745 - DNA, 24 bp, Artificial Sequence
  Synthetic polynucleotide encoding artificial human antibody CDR-H1 region
ggattcaccttcagtacatatgaa

SEQ ID NO: 2746 - DNA, 24 bp, Artificial Sequence
  Synthetic polynucleotide encoding artificial human antibody CDR-H1 region
ggaggcaccttcagcagctatgct

SEQ ID NO: 2747 - DNA, 30 bp, Artificial Sequence
  Synthetic polynucleotide encoding artificial human antibody CDR-H1 region
ggtggctccatcagcagtgataattactac

SEQ ID NO: 2748 - DNA, 24 bp, Artificial Sequence
  Synthetic polynucleotide encoding artificial human antibody CDR-H1 region
ggtgcctccatcagtagttactac

SEQ ID NO: 2749 - DNA, 24 bp, Artificial Sequence
  Synthetic polynucleotide encoding artificial human antibody CDR-H1 region
ggaaacaccttcactacctatact

SEQ ID NO: 2750 - DNA, 24 bp, Artificial Sequence
  Synthetic polynucleotide encoding artificial human antibody CDR-H1 region
ggattcacctttagcagctatgcc

SEQ ID NO: 2751 - DNA, 24 bp, Artificial Sequence
  Synthetic polynucleotide encoding artificial human antibody CDR-H1 region
ggattcacctttgatgattatggc

SEQ ID NO: 2752 - DNA, 24 bp, Artificial Sequence
  Synthetic polynucleotide encoding artificial human antibody CDR-H1 region
ggattcaccttcagtagctatggc

SEQ ID NO: 2753 - DNA, 30 bp, Artificial Sequence
  Synthetic polynucleotide encoding artificial human antibody CDR-H1 region
ggtggctccatcagcagtggtggttactac

SEQ ID NO: 2754 - DNA, 24 bp, Artificial Sequence
  Synthetic polynucleotide encoding artificial human antibody CDR-H1 region
ggatacaccttcaccggctactat

SEQ ID NO: 2755 - DNA, 24 bp, Artificial Sequence
  Synthetic polynucleotide encoding artificial human antibody CDR-H1 region
ggattcaccttcagtagctacgac

SEQ ID NO: 2756 - DNA, 24 bp, Artificial Sequence
  Synthetic polynucleotide encoding artificial human antibody CDR-H1 region
ggattcaccttcaggagttatggc

SEQ ID NO: 2757 - DNA, 24 bp, Artificial Sequence
  Synthetic polynucleotide encoding artificial human antibody CDR-H1 region
ggattcaccttcagtgactactac

SEQ ID NO: 2758 - DNA, 24 bp, Artificial Sequence
  Synthetic polynucleotide encoding artificial human antibody CDR-H1 region
ggattcaccttcagtagttatcac

SEQ ID NO: 2759 - DNA, 24 bp, Artificial Sequence
  Synthetic polynucleotide encoding artificial human antibody CDR-H1 region
ggattcaccttcagtagctatgct

SEQ ID NO: 2760 - DNA, 24 bp, Artificial Sequence
  Synthetic polynucleotide encoding artificial human antibody CDR-H1 region
ggattcacccttgaagagtttgcc

SEQ ID NO: 2761 - DNA, 24 bp, Artificial Sequence
  Synthetic polynucleotide encoding artificial human antibody CDR-H1 region
ggtggctccatcagtgattactac

SEQ ID NO: 2762 - DNA, 24 bp, Artificial Sequence
  Synthetic polynucleotide encoding artificial human antibody CDR-H1 region
ggaggcaccttcagcagctatgct

SEQ ID NO: 2763 - DNA, 24 bp, Artificial Sequence
  Synthetic polynucleotide encoding artificial human antibody CDR-H1 region
ggttacacctttagcagctacggt

SEQ ID NO: 2764 - DNA, 24 bp, Artificial Sequence
  Synthetic polynucleotide encoding artificial human antibody CDR-H1 region
ggattcaccttccggagttatgaa

SEQ ID NO: 2765 - DNA, 24 bp, Artificial Sequence
  Synthetic polynucleotide encoding artificial human antibody CDR-H1 region
ggaggcaccttcagcagctatgct

SEQ ID NO: 2766 - DNA, 24 bp, Artificial Sequence
  Synthetic polynucleotide encoding artificial human antibody CDR-H1 region
ggagacagcttcaacaagtacttt

SEQ ID NO: 2767 - DNA, 24 bp, Artificial Sequence
  Synthetic polynucleotide encoding artificial human antibody CDR-H1 region
ggtttcacattcagtacctatggc

SEQ ID NO: 2768 - DNA, 24 bp, Artificial Sequence
  Synthetic polynucleotide encoding artificial human antibody CDR-H1 region
ggattcgcctttagcagctatgcc

SEQ ID NO: 2769 - DNA, 24 bp, Artificial Sequence
  Synthetic polynucleotide encoding artificial human antibody CDR-H1 region
ggattcaccttcagtaatcatgct

SEQ ID NO: 2770 - DNA, 24 bp, Artificial Sequence
  Synthetic polynucleotide encoding artificial human antibody CDR-H1 region
ggattcaccttcagtagtcatggc

SEQ ID NO: 2771 - DNA, 30 bp, Artificial Sequence
  Synthetic polynucleotide encoding artificial human antibody CDR-H1 region
ggtggctccgtcgacaatgttgattcctac

SEQ ID NO: 2772 - DNA, 24 bp, Artificial Sequence
  Synthetic polynucleotide encoding artificial human antibody CDR-H1 region
ggatacagctttaccacctactgg

SEQ ID NO: 2773 - DNA, 30 bp, Artificial Sequence
  Synthetic polynucleotide encoding artificial human antibody CDR-H1 region
ggtgactccatcagcagtgggagttactat

SEQ ID NO: 2774 - DNA, 30 bp, Artificial Sequence
  Synthetic polynucleotide encoding artificial human antibody CDR-H1 region
ggggacagtgtctctagcaacagtgctgct

SEQ ID NO: 2775 - DNA, 24 bp, Artificial Sequence
  Synthetic polynucleotide encoding artificial human antibody CDR-H1 region
ggatacaccctcagtgaattatcc

SEQ ID NO: 2776 - DNA, 24 bp, Artificial Sequence
  Synthetic polynucleotide encoding artificial human antibody CDR-H1 region
ggattcaccttcagtagctatagc

SEQ ID NO: 2777 - DNA, 24 bp, Artificial Sequence
  Synthetic polynucleotide encoding artificial human antibody CDR-H1 region
ggattcacctttagcaactatgcc

SEQ ID NO: 2778 - DNA, 24 bp, Artificial Sequence
  Synthetic polynucleotide encoding artificial human antibody CDR-H1 region
ggaggccccttcagcagctatact

SEQ ID NO: 2779 - DNA, 30 bp, Artificial Sequence
  Synthetic polynucleotide encoding artificial human antibody CDR-H1 region
ggtggctccgtcaacactggtacttcctac

SEQ ID NO: 2780 - DNA, 24 bp, Artificial Sequence
  Synthetic polynucleotide encoding artificial human antibody CDR-H1 region
ggattccatttcggcagtcacggc

SEQ ID NO: 2781 - DNA, 30 bp, Artificial Sequence
  Synthetic polynucleotide encoding artificial human antibody CDR-H1 region
ggtggctccatcaccactggtagttattac

SEQ ID NO: 2782 - DNA, 24 bp, Artificial Sequence
  Synthetic polynucleotide encoding artificial human antibody CDR-H1 region
ggattcacctttgatgattatgcc

SEQ ID NO: 2783 - DNA, 24 bp, Artificial Sequence
  Synthetic polynucleotide encoding artificial human antibody CDR-H1 region
ggtgcctccatgaataattactac

SEQ ID NO: 2784 - DNA, 30 bp, Artificial Sequence
  Synthetic polynucleotide encoding artificial human antibody CDR-H1 region
gggttctcactcaccactactgacgtgggt

SEQ ID NO: 2785 - DNA, 24 bp, Artificial Sequence
  Synthetic polynucleotide encoding artificial human antibody CDR-H1 region
ggattcaccttcagtagctattcc

SEQ ID NO: 2786 - DNA, 24 bp, Artificial Sequence
  Synthetic polynucleotide encoding artificial human antibody CDR-H1 region
ggatacaactttatcagccactgg

SEQ ID NO: 2787 - DNA, 24 bp, Artificial Sequence
  Synthetic polynucleotide encoding artificial human antibody CDR-H1 region
ggatacagctttaccagcttctgg

SEQ ID NO: 2788 - DNA, 24 bp, Artificial Sequence
  Synthetic polynucleotide encoding artificial human antibody CDR-H1 region
ggtggctccatcgatagttattac

SEQ ID NO: 2789 - DNA, 24 bp, Artificial Sequence
  Synthetic polynucleotide encoding artificial human antibody CDR-H1 region
ggaggcatcttcagttactttgct

SEQ ID NO: 2790 - DNA, 24 bp, Artificial Sequence
  Synthetic polynucleotide encoding artificial human antibody CDR-H1 region
gaattcagctttcaatatttttcc

SEQ ID NO: 2791 - DNA, 27 bp, Artificial Sequence
  Synthetic polynucleotide encoding artificial human antibody CDR-H1 region
ggttacacccttaacaatgatgtcgct

SEQ ID NO: 2792 - DNA, 24 bp, Artificial Sequence
  Synthetic polynucleotide encoding artificial human antibody CDR-H1 region
ggattcaggtttaattactattgg

SEQ ID NO: 2793 - DNA, 30 bp, Artificial Sequence
  Synthetic polynucleotide encoding artificial human antibody CDR-H1 region
ggtggctccatcagtggtgataaaaacttc

SEQ ID NO: 2794 - DNA, 24 bp, Artificial Sequence
  Synthetic polynucleotide encoding artificial human antibody CDR-H1 region
ggattcacattcagtgattatgaa

SEQ ID NO: 2795 - DNA, 24 bp, Artificial Sequence
  Synthetic polynucleotide encoding artificial human antibody CDR-H1 region
ggattcccccctaggagttttgcc

SEQ ID NO: 2796 - DNA, 24 bp, Artificial Sequence
  Synthetic polynucleotide encoding artificial human antibody CDR-H1 region
ggattcaccttcagcaactatggg

SEQ ID NO: 2797 - DNA, 24 bp, Artificial Sequence
  Synthetic polynucleotide encoding artificial human antibody CDR-H1 region
ggattcacctttgatgattatacc

SEQ ID NO: 2798 - DNA, 24 bp, Artificial Sequence
  Synthetic polynucleotide encoding artificial human antibody CDR-H1 region
ggtgacacctttcccaactatgtt

SEQ ID NO: 2799 - DNA, 24 bp, Artificial Sequence
  Synthetic polynucleotide encoding artificial human antibody CDR-H1 region
ggattcacatttgatgattatgcc

SEQ ID NO: 2800 - DNA, 24 bp, Artificial Sequence
  Synthetic polynucleotide encoding artificial human antibody CDR-H1 region
ggattcacctttagcagctatgcc

SEQ ID NO: 2801 - DNA, 24 bp, Artificial Sequence
  Synthetic polynucleotide encoding artificial human antibody CDR-H1 region
ggattcaccttcagtaactatgac

SEQ ID NO: 2802 - DNA, 24 bp, Artificial Sequence
  Synthetic polynucleotide encoding artificial human antibody CDR-H1 region
ggattcaccttcagtccctatagt

SEQ ID NO: 2803 - DNA, 30 bp, Artificial Sequence
  Synthetic polynucleotide encoding artificial human antibody CDR-H1 region
ggtggctccatcaccagtggtagttacttc

SEQ ID NO: 2804 - DNA, 30 bp, Artificial Sequence
  Synthetic polynucleotide encoding artificial human antibody CDR-H1 region
ggtggctccgtcagcagtagtagttactac

SEQ ID NO: 2805 - DNA, 24 bp, Artificial Sequence
  Synthetic polynucleotide encoding artificial human antibody CDR-H1 region
ggattcaccttcagtaactatgac

SEQ ID NO: 2806 - DNA, 24 bp, Artificial Sequence
  Synthetic polynucleotide encoding artificial human antibody CDR-H1 region
ggctacgcctttatcggtaactgg

SEQ ID NO: 2807 - DNA, 30 bp, Artificial Sequence
  Synthetic polynucleotide encoding artificial human antibody CDR-H1 region
ggattcaccttttcctttagcagttatgcc

SEQ ID NO: 2808 - DNA, 24 bp, Artificial Sequence
  Synthetic polynucleotide encoding artificial human antibody CDR-H1 region
ggattcaccttcaataattatgaa

SEQ ID NO: 2809 - DNA, 24 bp, Artificial Sequence
  Synthetic polynucleotide encoding artificial human antibody CDR-H1 region
ggattcacctttagtagcaattgg

SEQ ID NO: 2810 - DNA, 30 bp, Artificial Sequence; identical to SEQ ID NO: 2753
  Synthetic polynucleotide encoding artificial human antibody CDR-H1 region

SEQ ID NO: 2811 - DNA, 24 bp, Artificial Sequence
  Synthetic polynucleotide encoding artificial human antibody CDR-H1 region
ggattcacgttcagtagctatggc

SEQ ID NO: 2812 - DNA, 24 bp, Artificial Sequence
  Synthetic polynucleotide encoding artificial human antibody CDR-H1 region
ggattcaccttcagtgactactac

SEQ ID NO: 2813 - DNA, 30 bp, Artificial Sequence
  Synthetic polynucleotide encoding artificial human antibody CDR-H1 region
ggtggctccatcagcagtggtggttacccc

SEQ ID NO: 2814 - DNA, 24 bp, Artificial Sequence
  Synthetic polynucleotide encoding artificial human antibody CDR-H1 region
ggtggctccatcagtatttactac

SEQ ID NO: 2815 - DNA, 24 bp, Artificial Sequence
  Synthetic polynucleotide encoding artificial human antibody CDR-H1 region
aatagctccatcagtagttactac

SEQ ID NO: 2816 - DNA, 24 bp, Artificial Sequence
  Synthetic polynucleotide encoding artificial human antibody CDR-H1 region
ggattcacctttaatagctattgg

SEQ ID NO: 2817 - DNA, 24 bp, Artificial Sequence
  Synthetic polynucleotide encoding artificial human antibody CDR-H1 region
ggattcacctttgatgattatgcc

SEQ ID NO: 2818 - DNA, 24 bp, Artificial Sequence
  Synthetic polynucleotide encoding artificial human antibody CDR-H1 region
ggttacaggtttaacgcctactgg

SEQ ID NO: 2819 - DNA, 30 bp, Artificial Sequence
  Synthetic polynucleotide encoding artificial human antibody CDR-H1 region
ggggacagtgtctctagtaccagtggtgct

SEQ ID NO: 2820 - DNA, 30 bp, Artificial Sequence; identical to SEQ ID NO: 2774
  Synthetic polynucleotide encoding artificial human antibody CDR-H1 region

SEQ ID NO: 2821 - DNA, 24 bp, Artificial Sequence
  Synthetic polynucleotide encoding artificial human antibody CDR-H1 region
ggtggctccatcagtagttactac

SEQ ID NO: 2822 - DNA, 24 bp, Artificial Sequence
  Synthetic polynucleotide encoding artificial human antibody CDR-H1 region
ggatacagctttaccagctactgg

SEQ ID NO: 2823 - DNA, 24 bp, Artificial Sequence
  Synthetic polynucleotide encoding artificial human antibody CDR-H1 region
ggattcaccttcagtagctatggc

SEQ ID NO: 2824 - DNA, 24 bp, Artificial Sequence
  Synthetic polynucleotide encoding artificial human antibody CDR-H1 region
gggttcactttcagatcctacagc

SEQ ID NO: 2825 - DNA, 24 bp, Artificial Sequence
  Synthetic polynucleotide encoding artificial human antibody CDR-H1 region
ggaggcaccttcagcagttatact

SEQ ID NO: 2826 - DNA, 24 bp, Artificial Sequence
  Synthetic polynucleotide encoding artificial human antibody CDR-H1 region
ggattcagcttcagcagatataat

SEQ ID NO: 2827 - DNA, 24 bp, Artificial Sequence
  Synthetic polynucleotide encoding artificial human antibody CDR-H1 region
ggattcaccttcactaattatgcc

SEQ ID NO: 2828 - DNA, 24 bp, Artificial Sequence
  Synthetic polynucleotide encoding artificial human antibody CDR-H1 region
ggattctccttcagtagttttggc

SEQ ID NO: 2829 - DNA, 24 bp, Artificial Sequence
  Synthetic polynucleotide encoding artificial human antibody CDR-H1 region
ggattcacatttagctcgtatgcc

SEQ ID NO: 2830 - DNA, 24 bp, Artificial Sequence
  Synthetic polynucleotide encoding artificial human antibody CDR-H1 region
ggattcaccttcagtagtcatggc

SEQ ID NO: 2831 - DNA, 24 bp, Artificial Sequence
  Synthetic polynucleotide encoding artificial human antibody CDR-H1 region
ggattcagctttagtacctattgg

SEQ ID NO: 2832 - DNA, 24 bp, Artificial Sequence
  Synthetic polynucleotide encoding artificial human antibody CDR-H1 region
ggattcaccttcaataactactgg

SEQ ID NO: 2833 - DNA, 24 bp, Artificial Sequence
  Synthetic polynucleotide encoding artificial human antibody CDR-H1 region
ggatttactttcagtcacggctgg

SEQ ID NO: 2834 - DNA, 24 bp, Artificial Sequence
  Synthetic polynucleotide encoding artificial human antibody CDR-H1 region
ggtggctccatcagaaatgactac

SEQ ID NO: 2835 - DNA, 24 bp, Artificial Sequence
  Synthetic polynucleotide encoding artificial human antibody CDR-H1 region
ggaggcaccttcagcagctatgct

SEQ ID NO: 2836 - DNA, 30 bp, Artificial Sequence
  Synthetic polynucleotide encoding artificial human antibody CDR-H1 region
ggtggctccatcagcagtagtaattacttc

SEQ ID NO: 2837 - DNA, 24 bp, Artificial Sequence
  Synthetic polynucleotide encoding artificial human antibody CDR-H1 region
ggatttaccttcagtgactactgg

SEQ ID NO: 2838 - DNA, 30 bp, Artificial Sequence
  Synthetic polynucleotide encoding artificial human antibody CDR-H1 region
gatgtctccatcatcagtagtttctattac

SEQ ID NO: 2839 - DNA, 30 bp, Artificial Sequence
  Synthetic polynucleotide encoding artificial human antibody CDR-H1 region
ggtgcctccgtttccagtggttcttactac

SEQ ID NO: 2840 - DNA, 24 bp, Artificial Sequence
  Synthetic polynucleotide encoding artificial human antibody CDR-H1 region
ggaggcaccttcagcggctatggc

SEQ ID NO: 2841 - DNA, 24 bp, Artificial Sequence
  Synthetic polynucleotide encoding artificial human antibody CDR-H1 region
ggattcaccttcagtagctactgg

SEQ ID NO: 2842 - DNA, 30 bp, Artificial Sequence
  Synthetic polynucleotide encoding artificial human antibody CDR-H1 region
ggtggctccatcagcagtggagattactac

SEQ ID NO: 2843 - DNA, 24 bp, Artificial Sequence
  Synthetic polynucleotide encoding artificial human antibody CDR-H1 region
ggattcacctttagcagctatgcc

SEQ ID NO: 2844 - DNA, 24 bp, Artificial Sequence
  Synthetic polynucleotide encoding artificial human antibody CDR-H1 region
ggattcacctttagcagctatgcc

SEQ ID NO: 2845 - DNA, 24 bp, Artificial Sequence
  Synthetic polynucleotide encoding artificial human antibody CDR-H1 region
ggattcaccttgagcagctatgct

SEQ ID NO: 2846 - DNA, 30 bp, Artificial Sequence
  Synthetic polynucleotide encoding artificial human antibody CDR-H1 region
ggtggctccatcagcagtggtggttactcc

SEQ ID NO: 2847 - DNA, 24 bp, Artificial Sequence
  Synthetic polynucleotide encoding artificial human antibody CDR-H1 region
ggattcaccttcagtaactctgct

SEQ ID NO: 2848 - DNA, 24 bp, Artificial Sequence
  Synthetic polynucleotide encoding artificial human antibody CDR-H1 region
ggatacaccttcaccagtcactat

SEQ ID NO: 2849 - DNA, 24 bp, Artificial Sequence
  Synthetic polynucleotide encoding artificial human antibody CDR-H1 region
ggattcaccttcagcgcctactgg

SEQ ID NO: 2850 - DNA, 24 bp, Artificial Sequence
  Synthetic polynucleotide encoding artificial human antibody CDR-H1 region
ggatactccctcactgaaatctcc

SEQ ID NO: 2851 - DNA, 30 bp, Artificial Sequence
  Synthetic polynucleotide encoding artificial human antibody CDR-H1 region
ggtggctccatcaggagcagtgctcccttc

SEQ ID NO: 2852 - DNA, 24 bp, Artificial Sequence
  Synthetic polynucleotide encoding artificial human antibody CDR-H1 region
ggttacatctttaccacctatgtt

SEQ ID NO: 2853 - DNA, 24 bp, Artificial Sequence
  Synthetic polynucleotide encoding artificial human antibody CDR-H1 region
ggattcacgtttgatgattatgcc

SEQ ID NO: 2854 - DNA, 24 bp, Artificial Sequence
  Synthetic polynucleotide encoding artificial human antibody CDR-H1 region
ggattcaccttcaataattactgg

SEQ ID NO: 2855 - DNA, 24 bp, Artificial Sequence
  Synthetic polynucleotide encoding artificial human antibody CDR-H1 region
ggtgactccgtcagtagtttctac

SEQ ID NO: 2856 - DNA, 24 bp, Artificial Sequence
  Synthetic polynucleotide encoding artificial human antibody CDR-H1 region
ggatataattttaatgatgatcgg

SEQ ID NO: 2857 - DNA, 24 bp, Artificial Sequence
  Synthetic polynucleotide encoding artificial human antibody CDR-H1 region
ggattcaccgtcagtaccaactac

SEQ ID NO: 2858 - DNA, 24 bp, Artificial Sequence
  Synthetic polynucleotide encoding artificial human antibody CDR-H1 region
ggattcacgttcagtgaccactac

SEQ ID NO: 2859 - DNA, 24 bp, Artificial Sequence
  Synthetic polynucleotide encoding artificial human antibody CDR-H1 region
ggattcaccttccgtgattatggc

SEQ ID NO: 2860 - DNA, 24 bp, Artificial Sequence
  Synthetic polynucleotide encoding artificial human antibody CDR-H1 region
ggattcgacatcaggagttatacc

SEQ ID NO: 2861 - DNA, 24 bp, Artificial Sequence
  Synthetic polynucleotide encoding artificial human antibody CDR-H1 region
ggatacaccttcaccgactactat

SEQ ID NO: 2862 - DNA, 24 bp, Artificial Sequence
  Synthetic polynucleotide encoding artificial human antibody CDR-H1 region
ggattcacctttagcaactatgcc

SEQ ID NO: 2863 - DNA, 24 bp, Artificial Sequence
  Synthetic polynucleotide encoding artificial human antibody CDR-H1 region
ggattcaacttcaattcttataca

SEQ ID NO: 2864 - DNA, 24 bp, Artificial Sequence
  Synthetic polynucleotide encoding artificial human antibody CDR-H1 region
ggattcacatttgatgattatgcc

SEQ ID NO: 2865 - DNA, 24 bp, Artificial Sequence
  Synthetic polynucleotide encoding artificial human antibody CDR-H1 region
ggaggcaccttcagcagctatggt

SEQ ID NO: 2866 - DNA, 24 bp, Artificial Sequence
  Synthetic polynucleotide encoding artificial human antibody CDR-H1 region
ggattaacctttaacagatttgcc

SEQ ID NO: 2867 - DNA, 27 bp, Artificial Sequence
  Synthetic polynucleotide encoding artificial human antibody CDR-H1 region
ggctactccattagcactgcttactac

SEQ ID NO: 2868 - DNA, 24 bp, Artificial Sequence
  Synthetic polynucleotide encoding artificial human antibody CDR-H1 region
ggaggcaacgtcagaagttatagc

SEQ ID NO: 2869 - DNA, 24 bp, Artificial Sequence
  Synthetic polynucleotide encoding artificial human antibody CDR-H1 region
ggtgactccatcagtagtaactac

SEQ ID NO: 2870 - DNA, 24 bp, Artificial Sequence
  Synthetic polynucleotide encoding artificial human antibody CDR-H1 region
ggttacaggttttccaactttggg

SEQ ID NO: 2871 - DNA, 24 bp, Artificial Sequence
  Synthetic polynucleotide encoding artificial human antibody CDR-H1 region
ggatacacgttcactaattatgct

SEQ ID NO: 2872 - DNA, 30 bp, Artificial Sequence
  Synthetic polynucleotide encoding artificial human antibody CDR-H1 region
ggtgactccatcagcagcagtagctacttc

SEQ ID NO: 2873 - DNA, 24 bp, Artificial Sequence
  Synthetic polynucleotide encoding artificial human antibody CDR-H1 region
ggattcaccttcagtaactatggc

SEQ ID NO: 2874 - DNA, 24 bp, Artificial Sequence
  Synthetic polynucleotide encoding artificial human antibody CDR-H1 region
ggaggctccttcaacacctatgca

SEQ ID NO: 2875 - DNA, 24 bp, Artificial Sequence
  Synthetic polynucleotide encoding artificial human antibody CDR-H1 region
ggagacaccttcacctcttttgcc

SEQ ID NO: 2876 - DNA, 30 bp, Artificial Sequence
  Synthetic polynucleotide encoding artificial human antibody CDR-H1 region
ggtgactccatcagtaacggtgattattgc

SEQ ID NO: 2877 - DNA, 24 bp, Artificial Sequence
  Synthetic polynucleotide encoding artificial human antibody CDR-H1 region
ggattcacctttagaagctattgg

SEQ ID NO: 2878 - DNA, 24 bp, Artificial Sequence
  Synthetic polynucleotide encoding artificial human antibody CDR-H1 region
ggattcacctacgacagttatgtc

SEQ ID NO: 2879 - DNA, 30 bp, Artificial Sequence
  Synthetic polynucleotide encoding artificial human antibody CDR-H1 region
agtggctccgtcagcagtggtagtcactac

SEQ ID NO: 2880 - DNA, 24 bp, Artificial Sequence
  Synthetic polynucleotide encoding artificial human antibody CDR-H1 region
ggatacagcttcaccggctattat

SEQ ID NO: 2881 - DNA, 24 bp, Artificial Sequence
  Synthetic polynucleotide encoding artificial human antibody CDR-H1 region
ggattcaccttcagtaactatggc

SEQ ID NO: 2882 - DNA, 24 bp, Artificial Sequence
  Synthetic polynucleotide encoding artificial human antibody CDR-H1 region
ggattcaccttcagtaactataac

SEQ ID NO: 2883 - DNA, 30 bp, Artificial Sequence
  Synthetic polynucleotide encoding artificial human antibody CDR-H1 region
ggtggctccatcagcagtagtagttactac

SEQ ID NO: 2884 - DNA, 24 bp, Artificial Sequence
  Synthetic polynucleotide encoding artificial human antibody CDR-H1 region
ggtttcactttcagtaacgcctgg

SEQ ID NO: 2885 - DNA, 24 bp, Artificial Sequence
  Synthetic polynucleotide encoding artificial human antibody CDR-H1 region
ggatacaccttcaccaactacttt

SEQ ID NO: 2886 - DNA, 24 bp, Artificial Sequence
  Synthetic polynucleotide encoding artificial human antibody CDR-H1 region
ggaggcaccttcaacaactatggt

SEQ ID NO: 2887 - DNA, 24 bp, Artificial Sequence
  Synthetic polynucleotide encoding artificial human antibody CDR-H1 region
ggattcaccttcagtagttatgag

SEQ ID NO: 2888 - DNA, 24 bp, Artificial Sequence
  Synthetic polynucleotide encoding artificial human antibody CDR-H1 region
ggattcaccttcacgacctatgct

SEQ ID NO: 2889 - DNA, 24 bp, Artificial Sequence
  Synthetic polynucleotide encoding artificial human antibody CDR-H1 region
ggatacacctttaccagctactgg

SEQ ID NO: 2890 - DNA, 24 bp, Artificial Sequence
  Synthetic polynucleotide encoding artificial human antibody CDR-H1 region
ggactcaccttcagcatttatagc

SEQ ID NO: 2891 - DNA, 30 bp, Artificial Sequence
  Synthetic polynucleotide encoding artificial human antibody CDR-H1 region
gggttctcactcagcaatgctagaatgggt

SEQ ID NO: 2892 - DNA, 24 bp, Artificial Sequence
  Synthetic polynucleotide encoding artificial human antibody CDR-H1 region
ggatacaccttcaccgtctactat

SEQ ID NO: 2893 - DNA, 24 bp, Artificial Sequence
  Synthetic polynucleotide encoding artificial human antibody CDR-H1 region
ggttacacctttaccagctatggt

SEQ ID NO: 2894 - DNA, 30 bp, Artificial Sequence
  Synthetic polynucleotide encoding artificial human antibody CDR-H1 region
ggggacagtgtctctagcaccagtgctgct

SEQ ID NO: 2895 - DNA, 27 bp, Artificial Sequence
  Synthetic polynucleotide encoding artificial human antibody CDR-H1 region
ggtggctccatcagcagtagtaactgc

SEQ ID NO: 2896 - DNA, 24 bp, Artificial Sequence
  Synthetic polynucleotide encoding artificial human antibody CDR-H1 region
gggttcaccgtcagtagcaactac

SEQ ID NO: 2897 - DNA, 24 bp, Artificial Sequence
  Synthetic polynucleotide encoding artificial human antibody CDR-H1 region
ggatacaccttcaccacctactac

SEQ ID NO: 2898 - DNA, 30 bp, Artificial Sequence
  Synthetic polynucleotide encoding artificial human antibody CDR-H1 region
ggtggctccgtcagcagtggtagttactac

SEQ ID NO: 2899 - DNA, 30 bp, Artificial Sequence
  Synthetic polynucleotide encoding artificial human antibody CDR-H1 region
ggtggctccatcagcagtagtttcttctac

SEQ ID NO: 2900 - DNA, 24 bp, Artificial Sequence
  Synthetic polynucleotide encoding artificial human antibody CDR-H1 region
ggattcaccttcagtagctatgct

SEQ ID NO: 2901 - DNA, 24 bp, Artificial Sequence
  Synthetic polynucleotide encoding artificial human antibody CDR-H1 region
ggattcacctttagcacctatgtc

SEQ ID NO: 2902 - DNA, 30 bp, Artificial Sequence; identical to SEQ ID NO: 2883
  Synthetic polynucleotide encoding artificial human antibody CDR-H1 region

SEQ ID NO: 2903 - DNA, 24 bp, Artificial Sequence
  Synthetic polynucleotide encoding artificial human antibody CDR-H1 region
ggatacaccttcaccggctactat

SEQ ID NO: 2904 - DNA, 24 bp, Artificial Sequence
  Synthetic polynucleotide encoding artificial human antibody CDR-H1 region
ggatacagctttaccagctactgg

SEQ ID NO: 2905 - DNA, 24 bp, Artificial Sequence
  Synthetic polynucleotide encoding artificial human antibody CDR-H1 region
ggatacagctttaccacctactgg

SEQ ID NO: 2906 - DNA, 24 bp, Artificial Sequence
  Synthetic polynucleotide encoding artificial human antibody CDR-H1 region
ggattcacctttagaatctatgcc

SEQ ID NO: 2907 - DNA, 24 bp, Artificial Sequence
  Synthetic polynucleotide encoding artificial human antibody CDR-H1 region
ggatacaccttcaccagctactat

SEQ ID NO: 2908 - DNA, 24 bp, Artificial Sequence
  Synthetic polynucleotide encoding artificial human antibody CDR-H1 region
ggattagacttcagggactactat

SEQ ID NO: 2909 - DNA, 24 bp, Artificial Sequence
  Synthetic polynucleotide encoding artificial human antibody CDR-H1 region
ggattcacctttatcagttatgcc

SEQ ID NO: 2910 - DNA, 24 bp, Artificial Sequence
  Synthetic polynucleotide encoding artificial human antibody CDR-H1 region
ggatacaccttcactagtcatgcc

SEQ ID NO: 2911 - DNA, 24 bp, Artificial Sequence
  Synthetic polynucleotide encoding artificial human antibody CDR-H1 region
ggatacaccttcactaactatgct

SEQ ID NO: 2912 - DNA, 24 bp, Artificial Sequence
  Synthetic polynucleotide encoding artificial human antibody CDR-H1 region
ggattcaccttcagtaactttgct

SEQ ID NO: 2913 - DNA, 24 bp, Artificial Sequence
  Synthetic polynucleotide encoding artificial human antibody CDR-H1 region
ggattcaccttcagtcactacgcc

SEQ ID NO: 2914 - DNA, 24 bp, Artificial Sequence
  Synthetic polynucleotide encoding artificial human antibody CDR-H1 region
ggattcaccttcagtagctatagc

SEQ ID NO: 2915 - DNA, 30 bp, Artificial Sequence
  Synthetic polynucleotide encoding artificial human antibody CDR-H1 region
gggttctcactcagtactaatggagtgggt

SEQ ID NO: 2916 - DNA, 30 bp, Artificial Sequence
  Synthetic polynucleotide encoding artificial human antibody CDR-H1 region
gggttgtcactcagcactagtggagtggct

SEQ ID NO: 2917 - DNA, 30 bp, Artificial Sequence
  Synthetic polynucleotide encoding artificial human antibody CDR-H1 region
ggtggctccatcagcagcggtggttactgc

SEQ ID NO: 2918 - DNA, 24 bp, Artificial Sequence
  Synthetic polynucleotide encoding artificial human antibody CDR-H1 region
ggattcacctttagtagctattgg

SEQ ID NO: 2919 - DNA, 24 bp, Artificial Sequence
  Synthetic polynucleotide encoding artificial human antibody CDR-H1 region
agaggcaccttcagcaaccatgct

SEQ ID NO: 2920 - DNA, 24 bp, Artificial Sequence
  Synthetic polynucleotide encoding artificial human antibody CDR-H1 region
ggaggcaccttcaacttctatgct

SEQ ID NO: 2921 - DNA, 24 bp, Artificial Sequence
  Synthetic polynucleotide encoding artificial human antibody CDR-H1 region
ggatataacttcattgacaatgct

SEQ ID NO: 2922 - DNA, 24 bp, Artificial Sequence
  Synthetic polynucleotide encoding artificial human antibody CDR-H1 region
ggttacacttttacccactatggt

SEQ ID NO: 2923 - DNA, 24 bp, Artificial Sequence
  Synthetic polynucleotide encoding artificial human antibody CDR-H1 region
ggattcacctttagcaactatgcc

SEQ ID NO: 2924 - DNA, 24 bp, Artificial Sequence
  Synthetic polynucleotide encoding artificial human antibody CDR-H1 region
ggatacaccttcagcagctactat

SEQ ID NO: 2925 - DNA, 24 bp, Artificial Sequence
  Synthetic polynucleotide encoding artificial human antibody CDR-H1 region
ggatacaactttagtcgctactgg

SEQ ID NO: 2926 - DNA, 24 bp, Artificial Sequence
  Synthetic polynucleotide encoding artificial human antibody CDR-H1 region
ggattcaccttcaatagatatggc

SEQ ID NO: 2927 - DNA, 24 bp, Artificial Sequence
  Synthetic polynucleotide encoding artificial human antibody CDR-H1 region
ggatacagctttaccagcttctgg

SEQ ID NO: 2928 - DNA, 24 bp, Artificial Sequence
  Synthetic polynucleotide encoding artificial human antibody CDR-H1 region
ggattcaccctggatgattatgtc

SEQ ID NO: 2929 - DNA, 30 bp, Artificial Sequence
  Synthetic polynucleotide encoding artificial human antibody CDR-H1 region
ggtgactccatcagtagtagcggtttcttc

SEQ ID NO: 2930 - DNA, 24 bp, Artificial Sequence
  Synthetic polynucleotide encoding artificial human antibody CDR-H1 region
ggaggccccttcaagacctaccct

SEQ ID NO: 2931 - DNA, 24 bp, Artificial Sequence
  Synthetic polynucleotide encoding artificial human antibody CDR-H1 region
ggattcacctttggtgataatgct

SEQ ID NO: 2932 - DNA, 24 bp, Artificial Sequence
  Synthetic polynucleotide encoding artificial human antibody CDR-H1 region
ggttacacctttagtaattacggt

SEQ ID NO: 2933 - DNA, 24 bp, Artificial Sequence
  Synthetic polynucleotide encoding artificial human antibody CDR-H1 region
ggattcgactttacttcgtattgg

SEQ ID NO: 2934 - DNA, 24 bp, Artificial Sequence
  Synthetic polynucleotide encoding artificial human antibody CDR-H1 region
ggattcaccttcagtagctatagc

SEQ ID NO: 2935 - DNA, 30 bp, Artificial Sequence
  Synthetic polynucleotide encoding artificial human antibody CDR-H1 region
ggtgtctccatcggcaccagtagttactat

SEQ ID NO: 2936 - DNA, 24 bp, Artificial Sequence
  Synthetic polynucleotide encoding artificial human antibody CDR-H1 region
ggtgactccttcagtgattactac

SEQ ID NO: 2937 - DNA, 24 bp, Artificial Sequence
  Synthetic polynucleotide encoding artificial human antibody CDR-H1 region
ggattcaccttcagtaattatgcc

SEQ ID NO: 2938 - DNA, 24 bp, Artificial Sequence
  Synthetic polynucleotide encoding artificial human antibody CDR-H1 region
ggttacagatttaccagcaatggt

SEQ ID NO: 2939 - DNA, 24 bp, Artificial Sequence
  Synthetic polynucleotide encoding artificial human antibody CDR-H1 region
ggattcacctttgatgattatggc

SEQ ID NO: 2940 - DNA, 24 bp, Artificial Sequence
  Synthetic polynucleotide encoding artificial human antibody CDR-H1 region
ggattcagtttcagtgcctatggc

SEQ ID NO: 2941 - DNA, 24 bp, Artificial Sequence
  Synthetic polynucleotide encoding artificial human antibody CDR-H1 region
gaattcacctttagcgcctatgcc

SEQ ID NO: 2942 - DNA, 24 bp, Artificial Sequence
  Synthetic polynucleotide encoding artificial human antibody CDR-H1 region
ggtttcactttcagtaacgcctgg

SEQ ID NO: 2943 - DNA, 24 bp, Artificial Sequence
  Synthetic polynucleotide encoding artificial human antibody CDR-H1 region
ggactcaccttcagtgactatggc

SEQ ID NO: 2944 - DNA, 24 bp, Artificial Sequence
  Synthetic polynucleotide encoding artificial human antibody CDR-H1 region
ggttacgtctttaccagctttggg

SEQ ID NO: 2945 - DNA, 24 bp, Artificial Sequence
  Synthetic polynucleotide encoding artificial human antibody CDR-H1 region
ggattcaccttcgaagacttcggc

SEQ ID NO: 2946 - DNA, 24 bp, Artificial Sequence
  Synthetic polynucleotide encoding artificial human antibody CDR-H1 region
ggattcaccctcagtacctatggc

SEQ ID NO: 2947 - DNA, 24 bp, Artificial Sequence
  Synthetic polynucleotide encoding artificial human antibody CDR-H1 region
ggatataccttcagtaactatgct

SEQ ID NO: 2948 - DNA, 24 bp, Artificial Sequence
  Synthetic polynucleotide encoding artificial human antibody CDR-H1 region
ggatacagcttttccacctactgg

SEQ ID NO: 2949 - DNA, 30 bp, Artificial Sequence
  Synthetic polynucleotide encoding artificial human antibody CDR-H1 region
gggttctcactcaccacatatggagtgggt

SEQ ID NO: 2950 - DNA, 24 bp, Artificial Sequence
  Synthetic polynucleotide encoding artificial human antibody CDR-H1 region
ggattcaccttcagtgcttatggc

SEQ ID NO: 2951 - DNA, 24 bp, Artificial Sequence
  Synthetic polynucleotide encoding artificial human antibody CDR-H1 region
ggaggcaccttcagcgaatatggt

SEQ ID NO: 2952 - DNA, 30 bp, Artificial Sequence
  Synthetic polynucleotide encoding artificial human antibody CDR-H1 region
ggtgcctccgtcaacagtgggactcacttc

SEQ ID NO: 2953 - DNA, 24 bp, Artificial Sequence
  Synthetic polynucleotide encoding artificial human antibody CDR-H1 region
ggattcaccttcagtagctatgct

SEQ ID NO: 2954 - DNA, 24 bp, Artificial Sequence
  Synthetic polynucleotide encoding artificial human antibody CDR-H1 region
ggattcaccttcagtagctatagc

SEQ ID NO: 2955 - DNA, 30 bp, Artificial Sequence
  Synthetic polynucleotide encoding artificial human antibody CDR-H1 region
ggtgactccatcagcaggagtaattactac

SEQ ID NO: 2956 - DNA, 24 bp, Artificial Sequence
  Synthetic polynucleotide encoding artificial human antibody CDR-H1 region
ggattcacctttagtaagttttgg

SEQ ID NO: 2957 - DNA, 30 bp, Artificial Sequence
  Synthetic polynucleotide encoding artificial human antibody CDR-H1 region
gggttctctctgaccactactggagtgggt

SEQ ID NO: 2958 - DNA, 24 bp, Artificial Sequence
  Synthetic polynucleotide encoding artificial human antibody CDR-H1 region
ggattcatcttcagtagctatggc

SEQ ID NO: 2959 - DNA, 24 bp, Artificial Sequence
  Synthetic polynucleotide encoding artificial human antibody CDR-H1 region
ggattcaccttcagtagttatgaa

SEQ ID NO: 2960 - DNA, 24 bp, Artificial Sequence
  Synthetic polynucleotide encoding artificial human antibody CDR-H1 region
ggattcaccttcagtagctatagc

SEQ ID NO: 2961 - DNA, 30 bp, Artificial Sequence
  Synthetic polynucleotide encoding artificial human antibody CDR-H1 region
gggttctcactcagcactagtggaatgtgt

SEQ ID NO: 2962 - DNA, 24 bp, Artificial Sequence
  Synthetic polynucleotide encoding artificial human antibody CDR-H1 region
ggattcacctttagtagctattgg

SEQ ID NO: 2963 - DNA, 24 bp, Artificial Sequence
  Synthetic polynucleotide encoding artificial human antibody CDR-H1 region
ggattcacctttgccagctatggc

SEQ ID NO: 2964 - DNA, 24 bp, Artificial Sequence
  Synthetic polynucleotide encoding artificial human antibody CDR-H1 region
ggattcaccttcagtagctatagt

SEQ ID NO: 2965 - DNA, 24 bp, Artificial Sequence
  Synthetic polynucleotide encoding artificial human antibody CDR-H1 region
ggatacatcttcaccggctccttt

SEQ ID NO: 2966 - DNA, 30 bp, Artificial Sequence
  Synthetic polynucleotide encoding artificial human antibody CDR-H1 region
ggtggctccatcagcagtggtacttactac

SEQ ID NO: 2967 - DNA, 24 bp, Artificial Sequence
  Synthetic polynucleotide encoding artificial human antibody CDR-H1 region
ggatacagctttaccaactactgg

SEQ ID NO: 2968 - DNA, 24 bp, Artificial Sequence
  Synthetic polynucleotide encoding artificial human antibody CDR-H1 region
ggattcactttcagtaacgcctgg

SEQ ID NO: 2969 - DNA, 24 bp, Artificial Sequence
  Synthetic polynucleotide encoding artificial human antibody CDR-H1 region
ggattccccttcagtacctatgct

SEQ ID NO: 2970 - DNA, 24 bp, Artificial Sequence
  Synthetic polynucleotide encoding artificial human antibody CDR-H1 region
ggtttctccttcagtggctcttct

SEQ ID NO: 2971 - DNA, 24 bp, Artificial Sequence
  Synthetic polynucleotide encoding artificial human antibody CDR-H1 region
ggtggctccatcagtagttattac

SEQ ID NO: 2972 - DNA, 24 bp, Artificial Sequence
  Synthetic polynucleotide encoding artificial human antibody CDR-H1 region
ggattcacctttggtgattatgct

SEQ ID NO: 2973 - DNA, 24 bp, Artificial Sequence
  Synthetic polynucleotide encoding artificial human antibody CDR-H1 region
ggattcaccctcagtaactatggc

SEQ ID NO: 2974 - DNA, 24 bp, Artificial Sequence
  Synthetic polynucleotide encoding artificial human antibody CDR-H1 region
ggattcagcatcactacccatagc

SEQ ID NO: 2975 - DNA, 24 bp, Artificial Sequence
  Synthetic polynucleotide encoding artificial human antibody CDR-H1 region
ggattcaccttcagtagttatgag

SEQ ID NO: 2976 - DNA, 24 bp, Artificial Sequence
  Synthetic polynucleotide encoding artificial human antibody CDR-H1 region
ggattcaccttcagtagctatagc

SEQ ID NO: 2977 - DNA, 24 bp, Artificial Sequence
  Synthetic polynucleotide encoding artificial human antibody CDR-H1 region
gggttcagcgtcagtagcaagtac

SEQ ID NO: 2978 - DNA, 24 bp, Artificial Sequence
  Synthetic polynucleotide encoding artificial human antibody CDR-H1 region
ggatacagctttaccaactactgg

SEQ ID NO: 2979 - DNA, 24 bp, Artificial Sequence
  Synthetic polynucleotide encoding artificial human antibody CDR-H1 region
gggttcaccttcagtggctctgct

SEQ ID NO: 2980 - DNA, 24 bp, Artificial Sequence
  Synthetic polynucleotide encoding artificial human antibody CDR-H1 region
ggattcaccttcagtgactatggc

SEQ ID NO: 2981 - DNA, 24 bp, Artificial Sequence
  Synthetic polynucleotide encoding artificial human antibody CDR-H1 region
ggatacaccttcaataactatggc

SEQ ID NO: 2982 - DNA, 18 bp, Artificial Sequence
  Synthetic polynucleotide encoding artificial human antibody CDR-L1 region
cagggtgttagcagctac

SEQ ID NO: 2983 - DNA, 18 bp, Artificial Sequence
  Synthetic polynucleotide encoding artificial human antibody CDR-L1 region
cagagcattggcagctat

SEQ ID NO: 2984 - DNA, 18 bp, Artificial Sequence
  Synthetic polynucleotide encoding artificial human antibody CDR-L1 region
cagggtattgacgtctgg

SEQ ID NO: 2985 - DNA, 24 bp, Artificial Sequence
  Synthetic polynucleotide encoding artificial human antibody CDR-L1 region
agttccaacatcggaagtaattat

SEQ ID NO: 2986 - DNA, 18 bp, Artificial Sequence
  Synthetic polynucleotide encoding artificial human antibody CDR-L1 region
agcctcagaaactattat

SEQ ID NO: 2987 - DNA, 18 bp, Artificial Sequence
  Synthetic polynucleotide encoding artificial human antibody CDR-L1 region
aacattggaattaaaagt

SEQ ID NO: 2988 - DNA, 18 bp, Artificial Sequence
  Synthetic polynucleotide encoding artificial human antibody CDR-L1 region
cagagcataagcagttat

SEQ ID NO: 2989 - DNA, 21 bp, Artificial Sequence
  Synthetic polynucleotide encoding artificial human antibody CDR-L1 region
cagagtgttagcagcagctac

SEQ ID NO: 2990 - DNA, 24 bp, Artificial Sequence
  Synthetic polynucleotide encoding artificial human antibody CDR-L1 region
agtggcaacattgccagctactat

SEQ ID NO: 2991 - DNA, 21 bp, Artificial Sequence
  Synthetic polynucleotide encoding artificial human antibody CDR-L1 region
cagagtgttagcagcagttac

SEQ ID NO: 2992 - DNA, 24 bp, Artificial Sequence
  Synthetic polynucleotide encoding artificial human antibody CDR-L1 region
agctccaatattgagaataatgat

SEQ ID NO: 2993 - DNA, 33 bp, Artificial Sequence
  Synthetic polynucleotide encoding artificial human antibody CDR-L1 region
caaagcctcgtacacagtgatggaaacacctac

SEQ ID NO: 2994 - DNA, 24 bp, Artificial Sequence
  Synthetic polynucleotide encoding artificial human antibody CDR-L1 region
agctccaatatcgggagaaattat

SEQ ID NO: 2995 - DNA, 24 bp, Artificial Sequence
  Synthetic polynucleotide encoding artificial human antibody CDR-L1 region
atctccaacatcggaagtaatcct

SEQ ID NO: 2996 - DNA, 18 bp, Artificial Sequence
  Synthetic polynucleotide encoding artificial human antibody CDR-L1 region
cagaatgttaacttcaac

SEQ ID NO: 2997 - DNA, 21 bp, Artificial Sequence
  Synthetic polynucleotide encoding artificial human antibody CDR-L1 region
cagagtgttagcagcagctcc

SEQ ID NO: 2998 - DNA, 18 bp, Artificial Sequence
  Synthetic polynucleotide encoding artificial human antibody CDR-L1 region
gctttgccaaagcaatat

SEQ ID NO: 2999 - DNA, 18 bp, Artificial Sequence
  Synthetic polynucleotide encoding artificial human antibody CDR-L1 region
cagagtgttagcagctac

SEQ ID NO: 3000 - DNA, 18 bp, Artificial Sequence
  Synthetic polynucleotide encoding artificial human antibody CDR-L1 region
cagagtgttggcagctac

SEQ ID NO: 3001 - DNA, 18 bp, Artificial Sequence
  Synthetic polynucleotide encoding artificial human antibody CDR-L1 region
caggccattgccaactct

SEQ ID NO: 3002 - DNA, 36 bp, Artificial Sequence
  Synthetic polynucleotide encoding artificial human antibody CDR-L1 region
cagagtgttttatacagctccaacaatgagaactac

SEQ ID NO: 3003 - DNA, 18 bp, Artificial Sequence
  Synthetic polynucleotide encoding artificial human antibody CDR-L1 region
cacaacattaacacctat

SEQ ID NO: 3004 - DNA, 27 bp, Artificial Sequence
  Synthetic polynucleotide encoding artificial human antibody CDR-L1 region
agcagtgacgttggtggttataactat

SEQ ID NO: 3005 - DNA, 24 bp, Artificial Sequence
  Synthetic polynucleotide encoding artificial human antibody CDR-L1 region
agcgccaacatcggaaagaattat

SEQ ID NO: 3006 - DNA, 18 bp, Artificial Sequence
  Synthetic polynucleotide encoding artificial human antibody CDR-L1 region
cagagcattagcacttat

SEQ ID NO: 3007 - DNA, 18 bp, Artificial Sequence
  Synthetic polynucleotide encoding artificial human antibody CDR-L1 region
cagagcattaagaactat

SEQ ID NO: 3008 - DNA, 27 bp, Artificial Sequence
  Synthetic polynucleotide encoding artificial human antibody CDR-L1 region
agctccaacatcggggcaggttatgat

SEQ ID NO: 3009 - DNA, 18 bp, Artificial Sequence
  Synthetic polynucleotide encoding artificial human antibody CDR-L1 region
aacattggaagtaaaact

SEQ ID NO: 3010 - DNA, 18 bp, Artificial Sequence
  Synthetic polynucleotide encoding artificial human antibody CDR-L1 region
caggatattagcaactgg

SEQ ID NO: 3011 - DNA, 18 bp, Artificial Sequence
  Synthetic polynucleotide encoding artificial human antibody CDR-L1 region
gcattgccaaacgaaaat

SEQ ID NO: 3012 - DNA, 27 bp, Artificial Sequence
  Synthetic polynucleotide encoding artificial human antibody CDR-L1 region
accagtgacattggtagttatgaccgt

SEQ ID NO: 3013 - DNA, 24 bp, Artificial Sequence
  Synthetic polynucleotide encoding artificial human antibody CDR-L1 region
agctccaacattgggaacaattat

SEQ ID NO: 3014 - DNA, 33 bp, Artificial Sequence
  Synthetic polynucleotide encoding artificial human antibody CDR-L1 region
caaagcctcgtatacagtgatggaaacacctac

SEQ ID NO: 3015 - DNA, 21 bp, Artificial Sequence
  Synthetic polynucleotide encoding artificial human antibody CDR-L1 region
cagagtattagaagcagctac

SEQ ID NO: 3016 - DNA, 27 bp, Artificial Sequence
  Synthetic polynucleotide encoding artificial human antibody CDR-L1 region
acctccaacatcggggctggttatgat

SEQ ID NO: 3017 - DNA, 18 bp, Artificial Sequence
  Synthetic polynucleotide encoding artificial human antibody CDR-L1 region
cagagcattagcagctat

SEQ ID NO: 3018 - DNA, 36 bp, Artificial Sequence
  Synthetic polynucleotide encoding artificial human antibody CDR-L1 region
cagaatgttttatacagttccaacaataaaaactac

SEQ ID NO: 3019 - DNA, 27 bp, Artificial Sequence
  Synthetic polynucleotide encoding artificial human antibody CDR-L1 region
agctccaacatcggggcaggttatgat

SEQ ID NO: 3020 - DNA, 24 bp, Artificial Sequence
  Synthetic polynucleotide encoding artificial human antibody CDR-L1 region
agtggcagcattgccagcagctat

SEQ ID NO: 3021 - DNA, 18 bp, Artificial Sequence
  Synthetic polynucleotide encoding artificial human antibody CDR-L1 region
cagagcattagcagctat

SEQ ID NO: 3022 - DNA, 18 bp, Artificial Sequence
  Synthetic polynucleotide encoding artificial human antibody CDR-L1 region
aacattggaagtaaaagt

SEQ ID NO: 3023 - DNA, 27 bp, Artificial Sequence
  Synthetic polynucleotide encoding artificial human antibody CDR-L1 region
agcagtgacgttggtggttataactat

SEQ ID NO: 3024 - DNA, 18 bp, Artificial Sequence
  Synthetic polynucleotide encoding artificial human antibody CDR-L1 region
cagagcattagcagctat

SEQ ID NO: 3025 - DNA, 18 bp, Artificial Sequence
  Synthetic polynucleotide encoding artificial human antibody CDR-L1 region
cagggcattaacagtgcc

SEQ ID NO: 3026 - DNA, 18 bp, Artificial Sequence
  Synthetic polynucleotide encoding artificial human antibody CDR-L1 region
agcctcagaaggtattat

SEQ ID NO: 3027 - DNA, 18 bp, Artificial Sequence
  Synthetic polynucleotide encoding artificial human antibody CDR-L1 region
cagggtattaggaattgg

SEQ ID NO: 3028 - DNA, 18 bp, Artificial Sequence
  Synthetic polynucleotide encoding artificial human antibody CDR-L1 region
cagagcgttggcacctat

SEQ ID NO: 3029 - DNA, 21 bp, Artificial Sequence
  Synthetic polynucleotide encoding artificial human antibody CDR-L1 region
cagagcgttagcagtaattac

SEQ ID NO: 3030 - DNA, 21 bp, Artificial Sequence
  Synthetic polynucleotide encoding artificial human antibody CDR-L1 region
cagagtgttagcagcaggtac

SEQ ID NO: 3031 - DNA, 18 bp, Artificial Sequence
  Synthetic polynucleotide encoding artificial human antibody CDR-L1 region
cagagtgttggcagctcc

SEQ ID NO: 3032 - DNA, 18 bp, Artificial Sequence
  Synthetic polynucleotide encoding artificial human antibody CDR-L1 region
cagagtattagtagctgg

SEQ ID NO: 3033 - DNA, 18 bp, Artificial Sequence
  Synthetic polynucleotide encoding artificial human antibody CDR-L1 region
aacattggaagtaaaagt

SEQ ID NO: 3034 - DNA, 18 bp, Artificial Sequence
  Synthetic polynucleotide encoding artificial human antibody CDR-L1 region
cagagtgttagcacctac

SEQ ID NO: 3035 - DNA, 33 bp, Artificial Sequence
  Synthetic polynucleotide encoding artificial human antibody CDR-L1 region
cagagcctcctgcatagtaatggatacaactat

SEQ ID NO: 3036 - DNA, 18 bp, Artificial Sequence
  Synthetic polynucleotide encoding artificial human antibody CDR-L1 region
cagagtattagtagctgg

SEQ ID NO: 3037 - DNA, 27 bp, Artificial Sequence
  Synthetic polynucleotide encoding artificial human antibody CDR-L1 region
tctggctcagtctcaactggaaactac

SEQ ID NO: 3038 - DNA, 21 bp, Artificial Sequence
  Synthetic polynucleotide encoding artificial human antibody CDR-L1 region
cagagtgttagcagcagctac

SEQ ID NO: 3039 - DNA, 18 bp, Artificial Sequence
  Synthetic polynucleotide encoding artificial human antibody CDR-L1 region
aacattggaagtaagagt

SEQ ID NO: 3040 - DNA, 18 bp, Artificial Sequence
  Synthetic polynucleotide encoding artificial human antibody CDR-L1 region
cagagtattagtaggtgg

SEQ ID NO: 3041 - DNA, 18 bp, Artificial Sequence
  Synthetic polynucleotide encoding artificial human antibody CDR-L1 region
caagacattgatgatgat

SEQ ID NO: 3042 - DNA, 21 bp, Artificial Sequence
  Synthetic polynucleotide encoding artificial human antibody CDR-L1 region
cagagtattggcgccgcctac

SEQ ID NO: 3043 - DNA, 18 bp, Artificial Sequence
  Synthetic polynucleotide encoding artificial human antibody CDR-L1 region
gcattgccaaaaaaatat

SEQ ID NO: 3044 - DNA, 33 bp, Artificial Sequence
  Synthetic polynucleotide encoding artificial human antibody CDR-L1 region
cagagcctcctgcatagtgatggatacaactat

SEQ ID NO: 3045 - DNA, 27 bp, Artificial Sequence
  Synthetic polynucleotide encoding artificial human antibody CDR-L1 region
agcagtgacgttggtggttataactat

SEQ ID NO: 3046 - DNA, 18 bp, Artificial Sequence
  Synthetic polynucleotide encoding artificial human antibody CDR-L1 region
cagagtattagcagtaac

SEQ ID NO: 3047 - DNA, 27 bp, Artificial Sequence
  Synthetic polynucleotide encoding artificial human antibody CDR-L1 region
agcagtgacgttggtggttataactat

SEQ ID NO: 3048 - DNA, 33 bp, Artificial Sequence
  Synthetic polynucleotide encoding artificial human antibody CDR-L1 region
cagcgcctcctgcatagtgatggaaagacctat

SEQ ID NO: 3049 - DNA, 21 bp, Artificial Sequence
  Synthetic polynucleotide encoding artificial human antibody CDR-L1 region
cagagtgtcagcagtagcttc

SEQ ID NO: 3050 - DNA, 18 bp, Artificial Sequence
  Synthetic polynucleotide encoding artificial human antibody CDR-L1 region
caggacgttgacacttat

SEQ ID NO: 3051 - DNA, 24 bp, Artificial Sequence
  Synthetic polynucleotide encoding artificial human antibody CDR-L1 region
agctccaatattgggaaatattct

SEQ ID NO: 3052 - DNA, 18 bp, Artificial Sequence
  Synthetic polynucleotide encoding artificial human antibody CDR-L1 region
cagagtgttggtagctcc

SEQ ID NO: 3053 - DNA, 21 bp, Artificial Sequence
  Synthetic polynucleotide encoding artificial human antibody CDR-L1 region
cagagtgttagcagcagctac

SEQ ID NO: 3054 - DNA, 18 bp, Artificial Sequence
  Synthetic polynucleotide encoding artificial human antibody CDR-L1 region
cagagtattagtgtctgg

SEQ ID NO: 3055 - DNA, 18 bp, Artificial Sequence
  Synthetic polynucleotide encoding artificial human antibody CDR-L1 region
agtctcagaaggtattat

SEQ ID NO: 3056 - DNA, 18 bp, Artificial Sequence
  Synthetic polynucleotide encoding artificial human antibody CDR-L1 region
cagagcattagcagctat

SEQ ID NO: 3057 - DNA, 21 bp, Artificial Sequence
  Synthetic polynucleotide encoding artificial human antibody CDR-L1 region
cagagtgttagcagcagctac

SEQ ID NO: 3058 - DNA, 24 bp, Artificial Sequence
  Synthetic polynucleotide encoding artificial human antibody CDR-L1 region
agctccaacattgacaataattat

SEQ ID NO: 3059 - DNA, 18 bp, Artificial Sequence
  Synthetic polynucleotide encoding artificial human antibody CDR-L1 region
cagaccattagcacctac

SEQ ID NO: 3060 - DNA, 36 bp, Artificial Sequence
  Synthetic polynucleotide encoding artificial human antibody CDR-L1 region
cagactgttttacacagttccaacaataggaactac

SEQ ID NO: 3061 - DNA, 18 bp, Artificial Sequence
  Synthetic polynucleotide encoding artificial human antibody CDR-L1 region
cagagtgttgacggcaac

SEQ ID NO: 3062 - DNA, 18 bp, Artificial Sequence
  Synthetic polynucleotide encoding artificial human antibody CDR-L1 region
cagagcattagcaactat

SEQ ID NO: 3063 - DNA, 27 bp, Artificial Sequence
  Synthetic polynucleotide encoding artificial human antibody CDR-L1 region
agctccaacatcggggcaggttatgat

SEQ ID NO: 3064 - DNA, 18 bp, Artificial Sequence
  Synthetic polynucleotide encoding artificial human antibody CDR-L1 region
cagagtgtgagcaccaac

SEQ ID NO: 3065 - DNA, 18 bp, Artificial Sequence
  Synthetic polynucleotide encoding artificial human antibody CDR-L1 region
cagagtgtgagtggctac

SEQ ID NO: 3066 - DNA, 24 bp, Artificial Sequence
  Synthetic polynucleotide encoding artificial human antibody CDR-L1 region
aggtccaacgtcgccagtcatgct

SEQ ID NO: 3067 - DNA, 36 bp, Artificial Sequence
  Synthetic polynucleotide encoding artificial human antibody CDR-L1 region
cagagcctcttggacagtgatgatggaaaaacctat

SEQ ID NO: 3068 - DNA, 18 bp, Artificial Sequence
  Synthetic polynucleotide encoding artificial human antibody CDR-L1 region
aaattgggggataaatat

SEQ ID NO: 3069 - DNA, 18 bp, Artificial Sequence
  Synthetic polynucleotide encoding artificial human antibody CDR-L1 region
aaattgggggatatatgt

SEQ ID NO: 3070 - DNA, 36 bp, Artificial Sequence
  Synthetic polynucleotide encoding artificial human antibody CDR-L1 region
cagagtcttttctatagctccaacaataagaactac

SEQ ID NO: 3071 - DNA, 18 bp, Artificial Sequence
  Synthetic polynucleotide encoding artificial human antibody CDR-L1 region
cagagtgttagcagctac

SEQ ID NO: 3072 - DNA, 18 bp, Artificial Sequence
  Synthetic polynucleotide encoding artificial human antibody CDR-L1 region
cagagtgttagcaactat

SEQ ID NO: 3073 - DNA, 33 bp, Artificial Sequence
  Synthetic polynucleotide encoding artificial human antibody CDR-L1 region
cagagcctcctacagagtaatggaaacaactat

SEQ ID NO: 3074 - DNA, 18 bp, Artificial Sequence
  Synthetic polynucleotide encoding artificial human antibody CDR-L1 region
cagagtattagtggctgg

SEQ ID NO: 3075 - DNA, 24 bp, Artificial Sequence
  Synthetic polynucleotide encoding artificial human antibody CDR-L1 region
agctccaacattggaaataattat

SEQ ID NO: 3076 - DNA, 18 bp, Artificial Sequence
  Synthetic polynucleotide encoding artificial human antibody CDR-L1 region
cagagtgttagcaactat

SEQ ID NO: 3077 - DNA, 33 bp, Artificial Sequence
  Synthetic polynucleotide encoding artificial human antibody CDR-L1 region
cagagcctccttcgtcgtgatggaaacaactat

SEQ ID NO: 3078 - DNA, 27 bp, Artificial Sequence
  Synthetic polynucleotide encoding artificial human antibody CDR-L1 region
agcagtgacgttggtggttttaactat

SEQ ID NO: 3079 - DNA, 33 bp, Artificial Sequence; identical to SEQ ID NO: 3014
  Synthetic polynucleotide encoding artificial human antibody CDR-L1 region

SEQ ID NO: 3080 - DNA, 18 bp, Artificial Sequence
  Synthetic polynucleotide encoding artificial human antibody CDR-L1 region
cagagtattagcagctat

SEQ ID NO: 3081 - DNA, 18 bp, Artificial Sequence
  Synthetic polynucleotide encoding artificial human antibody CDR-L1 region
caggacattagcaactat

SEQ ID NO: 3082 - DNA, 18 bp, Artificial Sequence
  Synthetic polynucleotide encoding artificial human antibody CDR-L1 region
aacattggaagtaaaagt

SEQ ID NO: 3083 - DNA, 18 bp, Artificial Sequence
  Synthetic polynucleotide encoding artificial human antibody CDR-L1 region
caggtcattagcgattat

SEQ ID NO: 3084 - DNA, 18 bp, Artificial Sequence
  Synthetic polynucleotide encoding artificial human antibody CDR-L1 region
cagagcattagcacttat

SEQ ID NO: 3085 - DNA, 18 bp, Artificial Sequence
  Synthetic polynucleotide encoding artificial human antibody CDR-L1 region
cagagaattagtaactgg

SEQ ID NO: 3086 - DNA, 33 bp, Artificial Sequence
  Synthetic polynucleotide encoding artificial human antibody CDR-L1 region
cagagcctcctgaatcctgatggaaagacctat

SEQ ID NO: 3087 - DNA, 18 bp, Artificial Sequence
  Synthetic polynucleotide encoding artificial human antibody CDR-L1 region
cagagcattagcggctat

SEQ ID NO: 3088 - DNA, 27 bp, Artificial Sequence
  Synthetic polynucleotide encoding artificial human antibody CDR-L1 region
agctccaacgtcggggcagattatgat

SEQ ID NO: 3089 - DNA, 18 bp, Artificial Sequence
  Synthetic polynucleotide encoding artificial human antibody CDR-L1 region
cagagtgttagcagctcc

SEQ ID NO: 3090 - DNA, 21 bp, Artificial Sequence
  Synthetic polynucleotide encoding artificial human antibody CDR-L1 region
cagagttttgacggcaagtcc

SEQ ID NO: 3091 - DNA, 36 bp, Artificial Sequence
  Synthetic polynucleotide encoding artificial human antibody CDR-L1 region
cagagtattttatacagctccaacaataaggactcc

SEQ ID NO: 3092 - DNA, 21 bp, Artificial Sequence
  Synthetic polynucleotide encoding artificial human antibody CDR-L1 region
cagagtgttagcggcagccac

SEQ ID NO: 3093 - DNA, 27 bp, Artificial Sequence
  Synthetic polynucleotide encoding artificial human antibody CDR-L1 region
agcagtgacgttggtggttataactat

SEQ ID NO: 3094 - DNA, 18 bp, Artificial Sequence
  Synthetic polynucleotide encoding artificial human antibody CDR-L1 region
gcattgccaaaaaaatat

SEQ ID NO: 3095 - DNA, 18 bp, Artificial Sequence
  Synthetic polynucleotide encoding artificial human antibody CDR-L1 region
cagagtgttagcagcaac

SEQ ID NO: 3096 - DNA, 21 bp, Artificial Sequence
  Synthetic polynucleotide encoding artificial human antibody CDR-L1 region
cagagtgttagcagcagctac

SEQ ID NO: 3097 - DNA, 27 bp, Artificial Sequence
  Synthetic polynucleotide encoding artificial human antibody CDR-L1 region
agcagtgacgttggtctttataacttt

SEQ ID NO: 3098 - DNA, 27 bp, Artificial Sequence
  Synthetic polynucleotide encoding artificial human antibody CDR-L1 region
aactccaacatcggggcaggttattat

SEQ ID NO: 3099 - DNA, 21 bp, Artificial Sequence
  Synthetic polynucleotide encoding artificial human antibody CDR-L1 region
cagagtgttaccagcagctac

SEQ ID NO: 3100 - DNA, 24 bp, Artificial Sequence
  Synthetic polynucleotide encoding artificial human antibody CDR-L1 region
agctccaacatcggagataatttt

SEQ ID NO: 3101 - DNA, 18 bp, Artificial Sequence
  Synthetic polynucleotide encoding artificial human antibody CDR-L1 region
caagacattgacgatgat

SEQ ID NO: 3102 - DNA, 18 bp, Artificial Sequence
  Synthetic polynucleotide encoding artificial human antibody CDR-L1 region
cagagtgttggtagctgg

SEQ ID NO: 3103 - DNA, 18 bp, Artificial Sequence
  Synthetic polynucleotide encoding artificial human antibody CDR-L1 region
caggacattagcagtttt

SEQ ID NO: 3104 - DNA, 18 bp, Artificial Sequence
  Synthetic polynucleotide encoding artificial human antibody CDR-L1 region
agcctcagagactattct

SEQ ID NO: 3105 - DNA, 18 bp, Artificial Sequence
  Synthetic polynucleotide encoding artificial human antibody CDR-L1 region
cagagtgttagcgcctac

SEQ ID NO: 3106 - DNA, 18 bp, Artificial Sequence
  Synthetic polynucleotide encoding artificial human antibody CDR-L1 region
aacattggaagtaaaagt

SEQ ID NO: 3107 - DNA, 27 bp, Artificial Sequence
  Synthetic polynucleotide encoding artificial human antibody CDR-L1 region
agcagtgatgttggaaattataacctt

SEQ ID NO: 3108 - DNA, 18 bp, Artificial Sequence
  Synthetic polynucleotide encoding artificial human antibody CDR-L1 region
cagagtgtcagaagccac

SEQ ID NO: 3109 - DNA, 18 bp, Artificial Sequence
  Synthetic polynucleotide encoding artificial human antibody CDR-L1 region
agcctcagaagttattat

SEQ ID NO: 3110 - DNA, 21 bp, Artificial Sequence
  Synthetic polynucleotide encoding artificial human antibody CDR-L1 region
caggctattgtcagcaattac

SEQ ID NO: 3111 - DNA, 18 bp, Artificial Sequence
  Synthetic polynucleotide encoding artificial human antibody CDR-L1 region
aacattggaaagaaagat

SEQ ID NO: 3112 - DNA, 18 bp, Artificial Sequence
  Synthetic polynucleotide encoding artificial human antibody CDR-L1 region
aacattggaagtaaaagt

SEQ ID NO: 3113 - DNA, 18 bp, Artificial Sequence
  Synthetic polynucleotide encoding artificial human antibody CDR-L1 region
gcattgccaaagcaatct

SEQ ID NO: 3114 - DNA, 18 bp, Artificial Sequence
  Synthetic polynucleotide encoding artificial human antibody CDR-L1 region
gcattgccaaagcaatat

SEQ ID NO: 3115 - DNA, 18 bp, Artificial Sequence
  Synthetic polynucleotide encoding artificial human antibody CDR-L1 region
gcattgccaaaaaaatat

SEQ ID NO: 3116 - DNA, 18 bp, Artificial Sequence
  Synthetic polynucleotide encoding artificial human antibody CDR-L1 region
cagaccattgacacctat

SEQ ID NO: 3117 - DNA, 18 bp, Artificial Sequence
  Synthetic polynucleotide encoding artificial human antibody CDR-L1 region
cagggcattaccaactat

SEQ ID NO: 3118 - DNA, 18 bp, Artificial Sequence
  Synthetic polynucleotide encoding artificial human antibody CDR-L1 region
caggacattagcacgttt

SEQ ID NO: 3119 - DNA, 27 bp, Artificial Sequence
  Synthetic polynucleotide encoding artificial human antibody CDR-L1 region
agcagtgatattggtggttataactat

SEQ ID NO: 3120 - DNA, 18 bp, Artificial Sequence
  Synthetic polynucleotide encoding artificial human antibody CDR-L1 region
aaattgggggataaatat

SEQ ID NO: 3121 - DNA, 24 bp, Artificial Sequence
  Synthetic polynucleotide encoding artificial human antibody CDR-L1 region
acctccaacattggaaataatttt

SEQ ID NO: 3122 - DNA, 21 bp, Artificial Sequence
  Synthetic polynucleotide encoding artificial human antibody CDR-L1 region
cagagtatcagcagcacctac

SEQ ID NO: 3123 - DNA, 21 bp, Artificial Sequence
  Synthetic polynucleotide encoding artificial human antibody CDR-L1 region
cagagtgttagcagcagctac

SEQ ID NO: 3124 - DNA, 27 bp, Artificial Sequence
  Synthetic polynucleotide encoding artificial human antibody CDR-L1 region
agcagtgacgttggcgattataactat

SEQ ID NO: 3125 - DNA, 18 bp, Artificial Sequence
  Synthetic polynucleotide encoding artificial human antibody CDR-L1 region
cagttcattagcgtctat

SEQ ID NO: 3126 - DNA, 18 bp, Artificial Sequence
  Synthetic polynucleotide encoding artificial human antibody CDR-L1 region
cagagtgttagcagcaag

SEQ ID NO: 3127 - DNA, 18 bp, Artificial Sequence
  Synthetic polynucleotide encoding artificial human antibody CDR-L1 region
gtattggcaaaaaattat

SEQ ID NO: 3128 - DNA, 27 bp, Artificial Sequence
  Synthetic polynucleotide encoding artificial human antibody CDR-L1 region
agcagtgacgttggtgcttatccgtat

SEQ ID NO: 3129 - DNA, 21 bp, Artificial Sequence
  Synthetic polynucleotide encoding artificial human antibody CDR-L1 region
cagagtttaagcagcggttac

SEQ ID NO: 3130 - DNA, 36 bp, Artificial Sequence
  Synthetic polynucleotide encoding artificial human antibody CDR-L1 region
cagagtcttttatacaggtccaacgataagaactac

SEQ ID NO: 3131 - DNA, 27 bp, Artificial Sequence
  Synthetic polynucleotide encoding artificial human antibody CDR-L1 region
ggctccaatatcggggctggttatgat

SEQ ID NO: 3132 - DNA, 27 bp, Artificial Sequence
  Synthetic polynucleotide encoding artificial human antibody CDR-L1 region
agcagtgacgttggtggttatgaccat

SEQ ID NO: 3133 - DNA, 18 bp, Artificial Sequence
  Synthetic polynucleotide encoding artificial human antibody CDR-L1 region
cagagtattagtagctgg

SEQ ID NO: 3134 - DNA, 18 bp, Artificial Sequence
  Synthetic polynucleotide encoding artificial human antibody CDR-L1 region
cagagtattgtcaccaac

SEQ ID NO: 3135 - DNA, 21 bp, Artificial Sequence
  Synthetic polynucleotide encoding artificial human antibody CDR-L1 region
agtgggcacagcacctacgcc

SEQ ID NO: 3136 - DNA, 21 bp, Artificial Sequence
  Synthetic polynucleotide encoding artificial human antibody CDR-L1 region
cagagtgttagcagcagctac

SEQ ID NO: 3137 - DNA, 27 bp, Artificial Sequence
  Synthetic polynucleotide encoding artificial human antibody CDR-L1 region
agctccaacctcggggcaggttatgct

SEQ ID NO: 3138 - DNA, 27 bp, Artificial Sequence
  Synthetic polynucleotide encoding artificial human antibody CDR-L1 region
agcaccaacatcgggacaatttatgat

SEQ ID NO: 3139 - DNA, 33 bp, Artificial Sequence
  Synthetic polynucleotide encoding artificial human antibody CDR-L1 region
cagagcctcctttctagtaatggacatcatctt

SEQ ID NO: 3140 - DNA, 18 bp, Artificial Sequence
  Synthetic polynucleotide encoding artificial human antibody CDR-L1 region
cagggcattagcagttat

SEQ ID NO: 3141 - DNA, 24 bp, Artificial Sequence
  Synthetic polynucleotide encoding artificial human antibody CDR-L1 region
aactccaacatcggaagtactttt

SEQ ID NO: 3142 - DNA, 33 bp, Artificial Sequence
  Synthetic polynucleotide encoding artificial human antibody CDR-L1 region
cagagcctcctgcatagtaatggagtctactac

SEQ ID NO: 3143 - DNA, 18 bp, Artificial Sequence
  Synthetic polynucleotide encoding artificial human antibody CDR-L1 region
agcctcagaagctatttt

SEQ ID NO: 3144 - DNA, 18 bp, Artificial Sequence
  Synthetic polynucleotide encoding artificial human antibody CDR-L1 region
cagagtataagtagttgg

SEQ ID NO: 3145 - DNA, 36 bp, Artificial Sequence
  Synthetic polynucleotide encoding artificial human antibody CDR-L1 region
cagactgttttatacgactccaacaataaaaactac

SEQ ID NO: 3146 - DNA, 24 bp, Artificial Sequence
  Synthetic polynucleotide encoding artificial human antibody CDR-L1 region
agcagcaacatcggaggtaagtat

SEQ ID NO: 3147 - DNA, 18 bp, Artificial Sequence
  Synthetic polynucleotide encoding artificial human antibody CDR-L1 region
cagagtattagtgactgg

SEQ ID NO: 3148 - DNA, 18 bp, Artificial Sequence
  Synthetic polynucleotide encoding artificial human antibody CDR-L1 region
aaccctggaattaagagt

SEQ ID NO: 3149 - DNA, 27 bp, Artificial Sequence
  Synthetic polynucleotide encoding artificial human antibody CDR-L1 region
acctccaacatcggggcagattatgat

SEQ ID NO: 3150 - DNA, 18 bp, Artificial Sequence
  Synthetic polynucleotide encoding artificial human antibody CDR-L1 region
agcctcagaagcttttat

SEQ ID NO: 3151 - DNA, 27 bp, Artificial Sequence
  Synthetic polynucleotide encoding artificial human antibody CDR-L1 region
agcagtgacgttgatggttataattat

SEQ ID NO: 3152 - DNA, 36 bp, Artificial Sequence
  Synthetic polynucleotide encoding artificial human antibody CDR-L1 region
cagagtgttttatacagctccgacaataagaactac

SEQ ID NO: 3153 - DNA, 27 bp, Artificial Sequence
  Synthetic polynucleotide encoding artificial human antibody CDR-L1 region
agcagtgacgttggtggttataactat

SEQ ID NO: 3154 - DNA, 18 bp, Artificial Sequence
  Synthetic polynucleotide encoding artificial human antibody CDR-L1 region
caggacattagcaactat

SEQ ID NO: 3155 - DNA, 18 bp, Artificial Sequence
  Synthetic polynucleotide encoding artificial human antibody CDR-L1 region
aacattggaagtaaaagt

SEQ ID NO: 3156 - DNA, 21 bp, Artificial Sequence
  Synthetic polynucleotide encoding artificial human antibody CDR-L1 region
cagagtgtaagaggcaattat

SEQ ID NO: 3157 - DNA, 24 bp, Artificial Sequence
  Synthetic polynucleotide encoding artificial human antibody CDR-L1 region
agctccaacattgggagtaattat

SEQ ID NO: 3158 - DNA, 18 bp, Artificial Sequence
  Synthetic polynucleotide encoding artificial human antibody CDR-L1 region
aacattggaagttacaat

SEQ ID NO: 3159 - DNA, 21 bp, Artificial Sequence
  Synthetic polynucleotide encoding artificial human antibody CDR-L1 region
cagagggttagcagcaactac

SEQ ID NO: 3160 - DNA, 27 bp, Artificial Sequence
  Synthetic polynucleotide encoding artificial human antibody CDR-L1 region
agcagtgatgttgggagttataacctt

SEQ ID NO: 3161 - DNA, 33 bp, Artificial Sequence; identical to SEQ ID NO: 3014
  Synthetic polynucleotide encoding artificial human antibody CDR-L1 region

SEQ ID NO: 3162 - DNA, 24 bp, Artificial Sequence
  Synthetic polynucleotide encoding artificial human antibody CDR-L1 region
agctccaacatcggaagtaattat

SEQ ID NO: 3163 - DNA, 18 bp, Artificial Sequence
  Synthetic polynucleotide encoding artificial human antibody CDR-L1 region
agcctcagaagctattat

SEQ ID NO: 3164 - DNA, 18 bp, Artificial Sequence
  Synthetic polynucleotide encoding artificial human antibody CDR-L1 region
cagagcattagcagctat

SEQ ID NO: 3165 - DNA, 18 bp, Artificial Sequence
  Synthetic polynucleotide encoding artificial human antibody CDR-L1 region
aacattggatatagaaat

SEQ ID NO: 3166 - DNA, 18 bp, Artificial Sequence
  Synthetic polynucleotide encoding artificial human antibody CDR-L1 region
cagggcattagaaatgat

SEQ ID NO: 3167 - DNA, 18 bp, Artificial Sequence
  Synthetic polynucleotide encoding artificial human antibody CDR-L1 region
cagagtattagtagctgg

SEQ ID NO: 3168 - DNA, 33 bp, Artificial Sequence
  Synthetic polynucleotide encoding artificial human antibody CDR-L1 region
cagagcctccttcatagtaatggattcaactat

SEQ ID NO: 3169 - DNA, 18 bp, Artificial Sequence
  Synthetic polynucleotide encoding artificial human antibody CDR-L1 region
aaattgggggataaatat

SEQ ID NO: 3170 - DNA, 18 bp, Artificial Sequence
  Synthetic polynucleotide encoding artificial human antibody CDR-L1 region
gcattgccaaaaaaatat

SEQ ID NO: 3171 - DNA, 18 bp, Artificial Sequence
  Synthetic polynucleotide encoding artificial human antibody CDR-L1 region
agcctcagaagctattat

SEQ ID NO: 3172 - DNA, 36 bp, Artificial Sequence
  Synthetic polynucleotide encoding artificial human antibody CDR-L1 region
cagagtgttttatacagctccagcagtaagaactac

SEQ ID NO: 3173 - DNA, 33 bp, Artificial Sequence
  Synthetic polynucleotide encoding artificial human antibody CDR-L1 region
cagagcctcctgcatagcaatggatacaactat

SEQ ID NO: 3174 - DNA, 27 bp, Artificial Sequence
  Synthetic polynucleotide encoding artificial human antibody CDR-L1 region
agcagtgacgttggtggttataactat

SEQ ID NO: 3175 - DNA, 36 bp, Artificial Sequence
  Synthetic polynucleotide encoding artificial human antibody CDR-L1 region
cagagtgttttatacagctccaacaataagaactac

SEQ ID NO: 3176 - DNA, 27 bp, Artificial Sequence
  Synthetic polynucleotide encoding artificial human antibody CDR-L1 region
agcagtgatgttgggagttataacctt

SEQ ID NO: 3177 - DNA, 18 bp, Artificial Sequence
  Synthetic polynucleotide encoding artificial human antibody CDR-L1 region
gctttgccaaaaaaatat

SEQ ID NO: 3178 - DNA, 18 bp, Artificial Sequence
  Synthetic polynucleotide encoding artificial human antibody CDR-L1 region
cagagtgttagcagcaac

SEQ ID NO: 3179 - DNA, 21 bp, Artificial Sequence
  Synthetic polynucleotide encoding artificial human antibody CDR-L1 region
cagagtgttagcagcagctac

SEQ ID NO: 3180 - DNA, 18 bp, Artificial Sequence
  Synthetic polynucleotide encoding artificial human antibody CDR-L1 region
aacattggaagtagaagt

SEQ ID NO: 3181 - DNA, 27 bp, Artificial Sequence
  Synthetic polynucleotide encoding artificial human antibody CDR-L1 region
agcagtgatattgggacttataacctt

SEQ ID NO: 3182 - DNA, 36 bp, Artificial Sequence
  Synthetic polynucleotide encoding artificial human antibody CDR-L1 region
cagagtgttttatccacctccaacaataagaactac

SEQ ID NO: 3183 - DNA, 18 bp, Artificial Sequence
  Synthetic polynucleotide encoding artificial human antibody CDR-L1 region
aacattggaagtaaaagt

SEQ ID NO: 3184 - DNA, 18 bp, Artificial Sequence
  Synthetic polynucleotide encoding artificial human antibody CDR-L1 region
cagcacattgccgggcgt

SEQ ID NO: 3185 - DNA, 24 bp, Artificial Sequence
  Synthetic polynucleotide encoding artificial human antibody CDR-L1 region
agctccaacatcggaagtaatact

SEQ ID NO: 3186 - DNA, 24 bp, Artificial Sequence
  Synthetic polynucleotide encoding artificial human antibody CDR-L1 region
agtggcagcattgccagcaactat

SEQ ID NO: 3187 - DNA, 27 bp, Artificial Sequence
  Synthetic polynucleotide encoding artificial human antibody CDR-L1 region
agctccaacatcggggcacattatgat

SEQ ID NO: 3188 - DNA, 18 bp, Artificial Sequence
  Synthetic polynucleotide encoding artificial human antibody CDR-L1 region
cagagcattagtagttat

SEQ ID NO: 3189 - DNA, 18 bp, Artificial Sequence
  Synthetic polynucleotide encoding artificial human antibody CDR-L1 region
caggacattagcaactat

SEQ ID NO: 3190 - DNA, 21 bp, Artificial Sequence
  Synthetic polynucleotide encoding artificial human antibody CDR-L1 region
caagatgttgccagcacctac

SEQ ID NO: 3191 - DNA, 27 bp, Artificial Sequence
  Synthetic polynucleotide encoding artificial human antibody CDR-L1 region
accagtgatgttgggacttataacctt

SEQ ID NO: 3192 - DNA, 21 bp, Artificial Sequence
  Synthetic polynucleotide encoding artificial human antibody CDR-L1 region
cagagtgttgccaacaactac

SEQ ID NO: 3193 - DNA, 21 bp, Artificial Sequence
  Synthetic polynucleotide encoding artificial human antibody CDR-L1 region
cagagtgttagcagcaactac

SEQ ID NO: 3194 - DNA, 27 bp, Artificial Sequence
  Synthetic polynucleotide encoding artificial human antibody CDR-L1 region
tctggttcagtctccactagtttctac

SEQ ID NO: 3195 - DNA, 27 bp, Artificial Sequence
  Synthetic polynucleotide encoding artificial human antibody CDR-L1 region
agctccaacatcggggcacaatatgat

SEQ ID NO: 3196 - DNA, 27 bp, Artificial Sequence
  Synthetic polynucleotide encoding artificial human antibody CDR-L1 region
agctccaacatcggggcaggttacgat

SEQ ID NO: 3197 - DNA, 21 bp, Artificial Sequence
  Synthetic polynucleotide encoding artificial human antibody CDR-L1 region
cagagtgttagcagcagttac

SEQ ID NO: 3198 - DNA, 27 bp, Artificial Sequence
  Synthetic polynucleotide encoding artificial human antibody CDR-L1 region
agcagtgacgttggtggttataactat

SEQ ID NO: 3199 - DNA, 27 bp, Artificial Sequence
  Synthetic polynucleotide encoding artificial human antibody CDR-L1 region
agcagtgatattgggggttatgacctt

SEQ ID NO: 3200 - DNA, 36 bp, Artificial Sequence; identical to SEQ ID NO: 3175
  Synthetic polynucleotide encoding artificial human antibody CDR-L1 region

SEQ ID NO: 3201 - DNA, 24 bp, Artificial Sequence
  Synthetic polynucleotide encoding artificial human antibody CDR-L1 region
agctccaacatcggaagtaatact

SEQ ID NO: 3202 - DNA, 27 bp, Artificial Sequence
  Synthetic polynucleotide encoding artificial human antibody CDR-L1 region
actggagtagtcaccactggtcattat

SEQ ID NO: 3203 - DNA, 27 bp, Artificial Sequence
  Synthetic polynucleotide encoding artificial human antibody CDR-L1 region
tactccaacatcggggcaggttatgat

SEQ ID NO: 3204 - DNA, 18 bp, Artificial Sequence
  Synthetic polynucleotide encoding artificial human antibody CDR-L1 region
cagaatattaacaggttc

SEQ ID NO: 3205 - DNA, 18 bp, Artificial Sequence
  Synthetic polynucleotide encoding artificial human antibody CDR-L1 region
cagggcattagaaatgat

SEQ ID NO: 3206 - DNA, 18 bp, Artificial Sequence
  Synthetic polynucleotide encoding artificial human antibody CDR-L1 region
agcctcagaacggattat

SEQ ID NO: 3207 - DNA, 36 bp, Artificial Sequence
  Synthetic polynucleotide encoding artificial human antibody CDR-L1 region
cagagtgttttatccagctacaacaataaggactac

SEQ ID NO: 3208 - DNA, 33 bp, Artificial Sequence; identical to SEQ ID NO: 3014
  Synthetic polynucleotide encoding artificial human antibody CDR-L1 region

SEQ ID NO: 3209 - DNA, 18 bp, Artificial Sequence
  Synthetic polynucleotide encoding artificial human antibody CDR-L1 region
gcattgccaaaaaaatat

SEQ ID NO: 3210 - DNA, 18 bp, Artificial Sequence
  Synthetic polynucleotide encoding artificial human antibody CDR-L1 region
aacattggaagtaaaagt

SEQ ID NO: 3211 - DNA, 18 bp, Artificial Sequence
  Synthetic polynucleotide encoding artificial human antibody CDR-L1 region
cagagcattagcacctat

SEQ ID NO: 3212 - DNA, 18 bp, Artificial Sequence
  Synthetic polynucleotide encoding artificial human antibody CDR-L1 region
cagagtgttggcagcgac

SEQ ID NO: 3213 - DNA, 36 bp, Artificial Sequence; identical to SEQ ID NO: 3175
  Synthetic polynucleotide encoding artificial human antibody CDR-L1 region

SEQ ID NO: 3214 - DNA, 18 bp, Artificial Sequence
  Synthetic polynucleotide encoding artificial human antibody CDR-L1 region
gcattggcaaaggaatat

SEQ ID NO: 3215 - DNA, 18 bp, Artificial Sequence
  Synthetic polynucleotide encoding artificial human antibody CDR-L1 region
cagaatattcgcgacttc

SEQ ID NO: 3216 - DNA, 36 bp, Artificial Sequence
  Synthetic polynucleotide encoding artificial human antibody CDR-L1 region
cagactattttatacagctccaacaataagaactat

SEQ ID NO: 3217 - DNA, 18 bp, Artificial Sequence
  Synthetic polynucleotide encoding artificial human antibody CDR-L1 region
aaattggggaataaatat

SEQ ID NO: 3218 - DNA, 24 bp, Artificial Sequence
  Synthetic polynucleotide encoding artificial human antibody CDR-L1 region
aggtccaacatcgggagtaatttt

SEQ ID NO: 3219 - DNA, 24 bp, Artificial Sequence
  Synthetic polynucleotide encoding artificial human antibody CDR-L1 region
agctccaacattgggaataactat

SEQ ID NO: 3220 - DNA, 18 bp, Artificial Sequence
  Synthetic polynucleotide encoding artificial human antibody CDR-L1 region
cagagtgttagtttctgg

SEQ ID NO: 3221 - DNA, 36 bp, Artificial Sequence
  Synthetic polynucleotide encoding artificial human antibody CDR-L1 region
cagagtgtcttctacagctccaacaataagaactac

SEQ ID NO: 3222 - DNA, 36 bp, Artificial Sequence; identical to SEQ ID NO: 3175
  Synthetic polynucleotide encoding artificial human antibody CDR-L1 region

SEQ ID NO: 3223 - DNA, 27 bp, Artificial Sequence
  Synthetic polynucleotide encoding artificial human antibody CDR-L1 region
agcaatgacattggtcgttataagtat

SEQ ID NO: 3224 - DNA, 33 bp, Artificial Sequence; identical to SEQ ID NO: 3014
  Synthetic polynucleotide encoding artificial human antibody CDR-L1 region

SEQ ID NO: 3225 - DNA, 18 bp, Artificial Sequence
  Synthetic polynucleotide encoding artificial human antibody CDR-L1 region
aaattgggggataaatat

SEQ ID NO: 3226 - DNA, 21 bp, Artificial Sequence
  Synthetic polynucleotide encoding artificial human antibody CDR-L1 region
cagagggttaacagcaactac

SEQ ID NO: 3227 - DNA, 18 bp, Artificial Sequence
  Synthetic polynucleotide encoding artificial human antibody CDR-L1 region
aatttgggaaataaatat

SEQ ID NO: 3228 - DNA, 33 bp, Artificial Sequence; identical to SEQ ID NO: 3035
  Synthetic polynucleotide encoding artificial human antibody CDR-L1 region

SEQ ID NO: 3229 - DNA, 24 bp, Artificial Sequence
  Synthetic polynucleotide encoding artificial human antibody CDR-L1 region
agctccaacattgggaataattat

SEQ ID NO: 3230 - DNA, 18 bp, Artificial Sequence
  Synthetic polynucleotide encoding artificial human antibody CDR-L1 region
cagagtattagtagctgg

SEQ ID NO: 3231 - DNA, 18 bp, Artificial Sequence
  Synthetic polynucleotide encoding artificial human antibody CDR-L1 region
cagagtattagtagctgg

SEQ ID NO: 3232 - DNA, 27 bp, Artificial Sequence
  Synthetic polynucleotide encoding artificial human antibody CDR-L1 region
agctccaacatcggggcaggttatgat

SEQ ID NO: 3233 - DNA, 18 bp, Artificial Sequence
  Synthetic polynucleotide encoding artificial human antibody CDR-L1 region
gcattgccaaagcaatat

SEQ ID NO: 3234 - DNA, 18 bp, Artificial Sequence
  Synthetic polynucleotide encoding artificial human antibody CDR-L1 region
cagaatattcgcaacaat

SEQ ID NO: 3235 - DNA, 18 bp, Artificial Sequence
  Synthetic polynucleotide encoding artificial human antibody CDR-L1 region
cagagtgttagcagcaac

SEQ ID NO: 3236 - DNA, 18 bp, Artificial Sequence
  Synthetic polynucleotide encoding artificial human antibody CDR-L1 region
cagagcattagcagctat

SEQ ID NO: 3237 - DNA, 18 bp, Artificial Sequence
  Synthetic polynucleotide encoding artificial human antibody CDR-L1 region
cagagcattagcacctat

SEQ ID NO: 3238 - DNA, 21 bp, Artificial Sequence
  Synthetic polynucleotide encoding artificial human antibody CDR-L1 region
cagagtgttaccagcagctac

SEQ ID NO: 3239 - DNA, 18 bp, Artificial Sequence
  Synthetic polynucleotide encoding artificial human antibody CDR-L1 region
aacattggaagtaaaagt

SEQ ID NO: 3240 - DNA, 24 bp, Artificial Sequence
  Synthetic polynucleotide encoding artificial human antibody CDR-L1 region
agtggcagcattgccgacaagtat

SEQ ID NO: 3241 - DNA, 33 bp, Artificial Sequence
  Synthetic polynucleotide encoding artificial human antibody CDR-L1 region
cagagcctcctacatagtaatggatacaactat

SEQ ID NO: 3242 - DNA, 18 bp, Artificial Sequence
  Synthetic polynucleotide encoding artificial human antibody CDR-L1 region
cagagtattagtagctgg

SEQ ID NO: 3243 - DNA, 33 bp, Artificial Sequence
  Synthetic polynucleotide encoding artificial human antibody CDR-L1 region
cagagcctcctgtatcgtgatggagagcactat

SEQ ID NO: 3244 - DNA, 18 bp, Artificial Sequence
  Synthetic polynucleotide encoding artificial human antibody CDR-L1 region
cagagcattagtagctat

SEQ ID NO: 3245 - DNA, 36 bp, Artificial Sequence
  Synthetic polynucleotide encoding artificial human antibody CDR-L1 region
cagagtcttttatacagttccaactataagaactac

SEQ ID NO: 3246 - DNA, 24 bp, Artificial Sequence
  Synthetic polynucleotide encoding artificial human antibody CDR-L1 region
agctccaacatcggaagtaattat

SEQ ID NO: 3247 - DNA, 27 bp, Artificial Sequence
  Synthetic polynucleotide encoding artificial human antibody CDR-L1 region
agcagtgacgttggtggttataactat

SEQ ID NO: 3248 - DNA, 27 bp, Artificial Sequence
  Synthetic polynucleotide encoding artificial human antibody CDR-L1 region
aactccaacatcggggcaggttatgat

SEQ ID NO: 3249 - DNA, 27 bp, Artificial Sequence
  Synthetic polynucleotide encoding artificial human antibody CDR-L1 region
agtgacatcaatgttactaactacaac

SEQ ID NO: 3250 - DNA, 33 bp, Artificial Sequence; identical to SEQ ID NO: 3044
  Synthetic polynucleotide encoding artificial human antibody CDR-L1 region

SEQ ID NO: 3251 - DNA, 18 bp, Artificial Sequence
  Synthetic polynucleotide encoding artificial human antibody CDR-L1 region
cagggcattagaaatgat

SEQ ID NO: 3252 - DNA, 33 bp, Artificial Sequence
  Synthetic polynucleotide encoding artificial human antibody CDR-L1 region
cagagcctcctgcatagtgatggaaagacctat

SEQ ID NO: 3253 - DNA, 24 bp, Artificial Sequence
  Synthetic polynucleotide encoding artificial human antibody CDR-H2 region
atgagtgggggtggtggtagtata

SEQ ID NO: 3254 - DNA, 24 bp, Artificial Sequence
  Synthetic polynucleotide encoding artificial human antibody CDR-H2 region
ataaagcaagatggaagtgagaaa

SEQ ID NO: 3255 - DNA, 24 bp, Artificial Sequence
  Synthetic polynucleotide encoding artificial human antibody CDR-H2 region
attagttggaacagtgggaacata

SEQ ID NO: 3256 - DNA, 21 bp, Artificial Sequence
  Synthetic polynucleotide encoding artificial human antibody CDR-H2 region
atttattgggatgatgataag

SEQ ID NO: 3257 - DNA, 24 bp, Artificial Sequence
  Synthetic polynucleotide encoding artificial human antibody CDR-H2 region
atcaacactagtggtggaagcaca

SEQ ID NO: 3258 - DNA, 24 bp, Artificial Sequence
  Synthetic polynucleotide encoding artificial human antibody CDR-H2 region
attagttggaatagtgttagtata

SEQ ID NO: 3259 - DNA, 24 bp, Artificial Sequence
  Synthetic polynucleotide encoding artificial human antibody CDR-H2 region
atcaccacttacaatcgtgacaca

SEQ ID NO: 3260 - DNA, 24 bp, Artificial Sequence
  Synthetic polynucleotide encoding artificial human antibody CDR-H2 region
attagtggggatggtggtggcaca

SEQ ID NO: 3261 - DNA, 24 bp, Artificial Sequence
  Synthetic polynucleotide encoding artificial human antibody CDR-H2 region
atacggtatgatggaagaaataaa

SEQ ID NO: 3262 - DNA, 24 bp, Artificial Sequence
  Synthetic polynucleotide encoding artificial human antibody CDR-H2 region
attggatgggacagtggtggcatc

SEQ ID NO: 3263 - DNA, 24 bp, Artificial Sequence
  Synthetic polynucleotide encoding artificial human antibody CDR-H2 region
atcagcatttacagtggtaacaca

SEQ ID NO: 3264 - DNA, 24 bp, Artificial Sequence
  Synthetic polynucleotide encoding artificial human antibody CDR-H2 region
atatcatctgatggaaggaagata

SEQ ID NO: 3265 - DNA, 24 bp, Artificial Sequence
  Synthetic polynucleotide encoding artificial human antibody CDR-H2 region
atcagtgctactactggtagcact

SEQ ID NO: 3266 - DNA, 27 bp, Artificial Sequence
  Synthetic polynucleotide encoding artificial human antibody CDR-H2 region
acatactacaggtccaagtggtataat

SEQ ID NO: 3267 - DNA, 24 bp, Artificial Sequence
  Synthetic polynucleotide encoding artificial human antibody CDR-H2 region
attcactatgatggaaggaataaa

SEQ ID NO: 3268 - DNA, 24 bp, Artificial Sequence
  Synthetic polynucleotide encoding artificial human antibody CDR-H2 region
attagtagtagtagtagttccata

SEQ ID NO: 3269 - DNA, 24 bp, Artificial Sequence
  Synthetic polynucleotide encoding artificial human antibody CDR-H2 region
atcagcgcttacaatggtaacacg

SEQ ID NO: 3270 - DNA, 24 bp, Artificial Sequence
  Synthetic polynucleotide encoding artificial human antibody CDR-H2 region
attggtattggtggcaataccata

SEQ ID NO: 3271 - DNA, 24 bp, Artificial Sequence
  Synthetic polynucleotide encoding artificial human antibody CDR-H2 region
atcaacgctggcaatggtaacaca

SEQ ID NO: 3272 - DNA, 21 bp, Artificial Sequence
  Synthetic polynucleotide encoding artificial human antibody CDR-H2 region
gtctatcatagtgggaatgcc

SEQ ID NO: 3273 - DNA, 21 bp, Artificial Sequence
  Synthetic polynucleotide encoding artificial human antibody CDR-H2 region
atttattgggatgatgatgag

SEQ ID NO: 3274 - DNA, 24 bp, Artificial Sequence
  Synthetic polynucleotide encoding artificial human antibody CDR-H2 region
attagttggggtagttcttacata

SEQ ID NO: 3275 - DNA, 24 bp, Artificial Sequence
  Synthetic polynucleotide encoding artificial human antibody CDR-H2 region
attagtagcagtagtaggtacata

SEQ ID NO: 3276 - DNA, 21 bp, Artificial Sequence
  Synthetic polynucleotide encoding artificial human antibody CDR-H2 region
atctattacagtgggaacagg

SEQ ID NO: 3277 - DNA, 21 bp, Artificial Sequence
  Synthetic polynucleotide encoding artificial human antibody CDR-H2 region
atctataccagtgggaatacc

SEQ ID NO: 3278 - DNA, 24 bp, Artificial Sequence
  Synthetic polynucleotide encoding artificial human antibody CDR-H2 region
attagtagtaaaagtagttccaaa

SEQ ID NO: 3279 - DNA, 21 bp, Artificial Sequence
  Synthetic polynucleotide encoding artificial human antibody CDR-H2 region
atctattatagagggaccacc

SEQ ID NO: 3280 - DNA, 24 bp, Artificial Sequence
  Synthetic polynucleotide encoding artificial human antibody CDR-H2 region
atctggtatgatggaagtaataaa

SEQ ID NO: 3281 - DNA, 21 bp, Artificial Sequence
  Synthetic polynucleotide encoding artificial human antibody CDR-H2 region
atgtacaccagtgggagcacc

SEQ ID NO: 3282 - DNA, 24 bp, Artificial Sequence
  Synthetic polynucleotide encoding artificial human antibody CDR-H2 region
atcaaccctaatagtggtggcaca

SEQ ID NO: 3283 - DNA, 21 bp, Artificial Sequence
  Synthetic polynucleotide encoding artificial human antibody CDR-H2 region
atccatcacactgggagcgcc

SEQ ID NO: 3284 - DNA, 21 bp, Artificial Sequence
  Synthetic polynucleotide encoding artificial human antibody CDR-H2 region
atctattatagtggggacacc

SEQ ID NO: 3285 - DNA, 24 bp, Artificial Sequence
  Synthetic polynucleotide encoding artificial human antibody CDR-H2 region
atatcacatgatggaagtaataaa

SEQ ID NO: 3286 - DNA, 21 bp, Artificial Sequence
  Synthetic polynucleotide encoding artificial human antibody CDR-H2 region
atttattgggatgatgataag

SEQ ID NO: 3287 - DNA, 24 bp, Artificial Sequence
  Synthetic polynucleotide encoding artificial human antibody CDR-H2 region
attaatactactagtgatcccata

SEQ ID NO: 3288 - DNA, 24 bp, Artificial Sequence
  Synthetic polynucleotide encoding artificial human antibody CDR-H2 region
atcatccctatctttggtacagca

SEQ ID NO: 3289 - DNA, 21 bp, Artificial Sequence
  Synthetic polynucleotide encoding artificial human antibody CDR-H2 region
atctatttcagtgtgaccacc

SEQ ID NO: 3290 - DNA, 21 bp, Artificial Sequence
  Synthetic polynucleotide encoding artificial human antibody CDR-H2 region
ctctcttacagtgggaacacc

SEQ ID NO: 3291 - DNA, 24 bp, Artificial Sequence
  Synthetic polynucleotide encoding artificial human antibody CDR-H2 region
atcaacgctggcaatggtgacata

SEQ ID NO: 3292 - DNA, 24 bp, Artificial Sequence
  Synthetic polynucleotide encoding artificial human antibody CDR-H2 region
attagtggtagtggtcatagcaca

SEQ ID NO: 3293 - DNA, 24 bp, Artificial Sequence
  Synthetic polynucleotide encoding artificial human antibody CDR-H2 region
attaattggaatggtggtagcaca

SEQ ID NO: 3294 - DNA, 24 bp, Artificial Sequence
  Synthetic polynucleotide encoding artificial human antibody CDR-H2 region
atatcatatgatggaagtaataaa

SEQ ID NO: 3295 - DNA, 21 bp, Artificial Sequence
  Synthetic polynucleotide encoding artificial human antibody CDR-H2 region
atctattacagtgggagcacc

SEQ ID NO: 3296 - DNA, 24 bp, Artificial Sequence
  Synthetic polynucleotide encoding artificial human antibody CDR-H2 region
atcaaccctaacagtggtggcaca

SEQ ID NO: 3297 - DNA, 21 bp, Artificial Sequence
  Synthetic polynucleotide encoding artificial human antibody CDR-H2 region
attggtactgctggtgacaca

SEQ ID NO: 3298 - DNA, 24 bp, Artificial Sequence
  Synthetic polynucleotide encoding artificial human antibody CDR-H2 region
atatcatatgatggaagtaatagt

SEQ ID NO: 3299 - DNA, 24 bp, Artificial Sequence
  Synthetic polynucleotide encoding artificial human antibody CDR-H2 region
atgagtagtggcggtaatcgcaga

SEQ ID NO: 3300 - DNA, 24 bp, Artificial Sequence
  Synthetic polynucleotide encoding artificial human antibody CDR-H2 region
attagtagtagtggtacttacata

SEQ ID NO: 3301 - DNA, 24 bp, Artificial Sequence
  Synthetic polynucleotide encoding artificial human antibody CDR-H2 region
atatcatatgatggaagcaataaa

SEQ ID NO: 3302 - DNA, 24 bp, Artificial Sequence
  Synthetic polynucleotide encoding artificial human antibody CDR-H2 region
atcagttggaatagtggttcgata

SEQ ID NO: 3303 - DNA, 21 bp, Artificial Sequence
  Synthetic polynucleotide encoding artificial human antibody CDR-H2 region
atctattatagtgggagcacc

SEQ ID NO: 3304 - DNA, 24 bp, Artificial Sequence
  Synthetic polynucleotide encoding artificial human antibody CDR-H2 region
atcatccctatctttggtacagca

SEQ ID NO: 3305 - DNA, 24 bp, Artificial Sequence
  Synthetic polynucleotide encoding artificial human antibody CDR-H2 region
atcaacggttacaatggtaacaca

SEQ ID NO: 3306 - DNA, 24 bp, Artificial Sequence
  Synthetic polynucleotide encoding artificial human antibody CDR-H2 region
attactagtagtggtgataccata

SEQ ID NO: 3307 - DNA, 24 bp, Artificial Sequence
  Synthetic polynucleotide encoding artificial human antibody CDR-H2 region
atcatccctatctttggtacaaca

SEQ ID NO: 3308 - DNA, 24 bp, Artificial Sequence
  Synthetic polynucleotide encoding artificial human antibody CDR-H2 region
atctatcctggtgactctgatacc

SEQ ID NO: 3309 - DNA, 24 bp, Artificial Sequence
  Synthetic polynucleotide encoding artificial human antibody CDR-H2 region
acatggtatgaggggactaacgaa

SEQ ID NO: 3310 - DNA, 24 bp, Artificial Sequence
  Synthetic polynucleotide encoding artificial human antibody CDR-H2 region
atgagtggtagtggtgctggcaca

SEQ ID NO: 3311 - DNA, 24 bp, Artificial Sequence
  Synthetic polynucleotide encoding artificial human antibody CDR-H2 region
atatcatatgatggaggcactaaa

SEQ ID NO: 3312 - DNA, 24 bp, Artificial Sequence
  Synthetic polynucleotide encoding artificial human antibody CDR-H2 region
atatggtatgatggaagtactaaa

SEQ ID NO: 3313 - DNA, 21 bp, Artificial Sequence
  Synthetic polynucleotide encoding artificial human antibody CDR-H2 region
atctatttcactgggagcacc

SEQ ID NO: 3314 - DNA, 24 bp, Artificial Sequence
  Synthetic polynucleotide encoding artificial human antibody CDR-H2 region
atctatcctggtgactctgatacc

SEQ ID NO: 3315 - DNA, 21 bp, Artificial Sequence
  Synthetic polynucleotide encoding artificial human antibody CDR-H2 region
atctataccagtgggagcacc

SEQ ID NO: 3316 - DNA, 27 bp, Artificial Sequence
  Synthetic polynucleotide encoding artificial human antibody CDR-H2 region
acacactacaggtccaagtggtataat

SEQ ID NO: 3317 - DNA, 24 bp, Artificial Sequence
  Synthetic polynucleotide encoding artificial human antibody CDR-H2 region
tttgatcctgaagatggtgaaaca

SEQ ID NO: 3318 - DNA, 24 bp, Artificial Sequence
  Synthetic polynucleotide encoding artificial human antibody CDR-H2 region
attagtagtagtagtagttacata

SEQ ID NO: 3319 - DNA, 24 bp, Artificial Sequence
  Synthetic polynucleotide encoding artificial human antibody CDR-H2 region
attagtggtagtggtggtagtaca

SEQ ID NO: 3320 - DNA, 24 bp, Artificial Sequence
  Synthetic polynucleotide encoding artificial human antibody CDR-H2 region
atcacccctatttttaatataacg

SEQ ID NO: 3321 - DNA, 21 bp, Artificial Sequence
  Synthetic polynucleotide encoding artificial human antibody CDR-H2 region
atctattatagtgggagcacc

SEQ ID NO: 3322 - DNA, 24 bp, Artificial Sequence
  Synthetic polynucleotide encoding artificial human antibody CDR-H2 region
ataacttatgatggacaaatcaaa

SEQ ID NO: 3323 - DNA, 21 bp, Artificial Sequence
  Synthetic polynucleotide encoding artificial human antibody CDR-H2 region
atttattatagtgggaccacc

SEQ ID NO: 3324 - DNA, 24 bp, Artificial Sequence
  Synthetic polynucleotide encoding artificial human antibody CDR-H2 region
attagttggaatagtggtagcata

SEQ ID NO: 3325 - DNA, 21 bp, Artificial Sequence
  Synthetic polynucleotide encoding artificial human antibody CDR-H2 region
atatatagtagtggagacacc

SEQ ID NO: 3326 - DNA, 21 bp, Artificial Sequence
  Synthetic polynucleotide encoding artificial human antibody CDR-H2 region
atttattgggatgatgatgag

SEQ ID NO: 3327 - DNA, 24 bp, Artificial Sequence
  Synthetic polynucleotide encoding artificial human antibody CDR-H2 region
gttagcagtagtggtagtaccatg

SEQ ID NO: 3328 - DNA, 24 bp, Artificial Sequence
  Synthetic polynucleotide encoding artificial human antibody CDR-H2 region
attgatcctagtgactcttatacc

SEQ ID NO: 3329 - DNA, 24 bp, Artificial Sequence
  Synthetic polynucleotide encoding artificial human antibody CDR-H2 region
atctttcctgctgactctgatacc

SEQ ID NO: 3330 - DNA, 21 bp, Artificial Sequence
  Synthetic polynucleotide encoding artificial human antibody CDR-H2 region
atcttttacagtggaattacc

SEQ ID NO: 3331 - DNA, 24 bp, Artificial Sequence
  Synthetic polynucleotide encoding artificial human antibody CDR-H2 region
atcatccctatttttggaacatca

SEQ ID NO: 3332 - DNA, 24 bp, Artificial Sequence
  Synthetic polynucleotide encoding artificial human antibody CDR-H2 region
atcacttgggatggttctataata

SEQ ID NO: 3333 - DNA, 24 bp, Artificial Sequence
  Synthetic polynucleotide encoding artificial human antibody CDR-H2 region
atcaatgcttaccagggcgtcaca

SEQ ID NO: 3334 - DNA, 24 bp, Artificial Sequence
  Synthetic polynucleotide encoding artificial human antibody CDR-H2 region
ataaaggaagatggaagtgagaaa

SEQ ID NO: 3335 - DNA, 21 bp, Artificial Sequence
  Synthetic polynucleotide encoding artificial human antibody CDR-H2 region
atctcttacaatgggaacacc

SEQ ID NO: 3336 - DNA, 18 bp, Artificial Sequence
  Synthetic polynucleotide encoding artificial human antibody CDR-H2 region
attggtagtagtgggaca

SEQ ID NO: 3337 - DNA, 24 bp, Artificial Sequence
  Synthetic polynucleotide encoding artificial human antibody CDR-H2 region
attagtggtcttggaaatagtata

SEQ ID NO: 3338 - DNA, 24 bp, Artificial Sequence
  Synthetic polynucleotide encoding artificial human antibody CDR-H2 region
atatcagatgatgggaatgataaa

SEQ ID NO: 3339 - DNA, 24 bp, Artificial Sequence
  Synthetic polynucleotide encoding artificial human antibody CDR-H2 region
attagttgggatggtggtagcaca

SEQ ID NO: 3340 - DNA, 24 bp, Artificial Sequence
  Synthetic polynucleotide encoding artificial human antibody CDR-H2 region
atcaacacgaacaatggtaaaaca

SEQ ID NO: 3341 - DNA, 24 bp, Artificial Sequence
  Synthetic polynucleotide encoding artificial human antibody CDR-H2 region
atcgattggagtggaaagaccaca

SEQ ID NO: 3342 - DNA, 24 bp, Artificial Sequence
  Synthetic polynucleotide encoding artificial human antibody CDR-H2 region
attagtggtagtggtggtagcaca

SEQ ID NO: 3343 - DNA, 24 bp, Artificial Sequence
  Synthetic polynucleotide encoding artificial human antibody CDR-H2 region
gtatcatatgatggaactaataaa

SEQ ID NO: 3344 - DNA, 24 bp, Artificial Sequence
  Synthetic polynucleotide encoding artificial human antibody CDR-H2 region
attactagtaccagtagttactta

SEQ ID NO: 3345 - DNA, 21 bp, Artificial Sequence
  Synthetic polynucleotide encoding artificial human antibody CDR-H2 region
atatataccagtgggagcacc

SEQ ID NO: 3346 - DNA, 21 bp, Artificial Sequence
  Synthetic polynucleotide encoding artificial human antibody CDR-H2 region
gtctattacagtgggaggacc

SEQ ID NO: 3347 - DNA, 24 bp, Artificial Sequence
  Synthetic polynucleotide encoding artificial human antibody CDR-H2 region
gtatcatatgatggaactaataaa

SEQ ID NO: 3348 - DNA, 24 bp, Artificial Sequence
  Synthetic polynucleotide encoding artificial human antibody CDR-H2 region
atttatcctgttgactctgatacc

SEQ ID NO: 3349 - DNA, 24 bp, Artificial Sequence
  Synthetic polynucleotide encoding artificial human antibody CDR-H2 region
accggtggtagtggttataccaaa

SEQ ID NO: 3350 - DNA, 24 bp, Artificial Sequence
  Synthetic polynucleotide encoding artificial human antibody CDR-H2 region
attagtagtagtggtagtaccata

SEQ ID NO: 3351 - DNA, 24 bp, Artificial Sequence
  Synthetic polynucleotide encoding artificial human antibody CDR-H2 region
ataaaggaagatggaagtgagaaa

SEQ ID NO: 3352 - DNA, 21 bp, Artificial Sequence
  Synthetic polynucleotide encoding artificial human antibody CDR-H2 region
atctattacagtgggagcacc

SEQ ID NO: 3353 - DNA, 24 bp, Artificial Sequence
  Synthetic polynucleotide encoding artificial human antibody CDR-H2 region
atatcatatgatggaagtaataaa

SEQ ID NO: 3354 - DNA, 24 bp, Artificial Sequence
  Synthetic polynucleotide encoding artificial human antibody CDR-H2 region
attggtagtagtactactgccata

SEQ ID NO: 3355 - DNA, 21 bp, Artificial Sequence
  Synthetic polynucleotide encoding artificial human antibody CDR-H2 region
atctcttacagtgggagcacc

SEQ ID NO: 3356 - DNA, 21 bp, Artificial Sequence
  Synthetic polynucleotide encoding artificial human antibody CDR-H2 region
atctattatagtgggagcacc

SEQ ID NO: 3357 - DNA, 21 bp, Artificial Sequence
  Synthetic polynucleotide encoding artificial human antibody CDR-H2 region
atctcttattctgggagcacc

SEQ ID NO: 3358 - DNA, 24 bp, Artificial Sequence
  Synthetic polynucleotide encoding artificial human antibody CDR-H2 region
ataaagcaagatggaagtgagaaa

SEQ ID NO: 3359 - DNA, 24 bp, Artificial Sequence
  Synthetic polynucleotide encoding artificial human antibody CDR-H2 region
attagttggaatagtggtagtata

SEQ ID NO: 3360 - DNA, 24 bp, Artificial Sequence
  Synthetic polynucleotide encoding artificial human antibody CDR-H2 region
atctatcctggtgactctgatacc

SEQ ID NO: 3361 - DNA, 27 bp, Artificial Sequence
  Synthetic polynucleotide encoding artificial human antibody CDR-H2 region
acatactacaggtcccagtggatgaat

SEQ ID NO: 3362 - DNA, 27 bp, Artificial Sequence
  Synthetic polynucleotide encoding artificial human antibody CDR-H2 region
acatactacaggtccaagtggtataat

SEQ ID NO: 3363 - DNA, 21 bp, Artificial Sequence
  Synthetic polynucleotide encoding artificial human antibody CDR-H2 region
ctcttttacagtgggagcacc

SEQ ID NO: 3364 - DNA, 24 bp, Artificial Sequence
  Synthetic polynucleotide encoding artificial human antibody CDR-H2 region
atctatcctggtgactctgatacc

SEQ ID NO: 3365 - DNA, 24 bp, Artificial Sequence
  Synthetic polynucleotide encoding artificial human antibody CDR-H2 region
atatggtatgatggaagtaataaa

SEQ ID NO: 3366 - DNA, 24 bp, Artificial Sequence
  Synthetic polynucleotide encoding artificial human antibody CDR-H2 region
attagtagcagtagtcgttacgtg

SEQ ID NO: 3367 - DNA, 24 bp, Artificial Sequence
  Synthetic polynucleotide encoding artificial human antibody CDR-H2 region
atcatccctatacttaatataaca

SEQ ID NO: 3368 - DNA, 24 bp, Artificial Sequence
  Synthetic polynucleotide encoding artificial human antibody CDR-H2 region
attagtagtactagcaattacata

SEQ ID NO: 3369 - DNA, 24 bp, Artificial Sequence
  Synthetic polynucleotide encoding artificial human antibody CDR-H2 region
atttcatatgatggaagtgatgaa

SEQ ID NO: 3370 - DNA, 24 bp, Artificial Sequence
  Synthetic polynucleotide encoding artificial human antibody CDR-H2 region
atatggcatgatggaagtcataaa

SEQ ID NO: 3371 - DNA, 24 bp, Artificial Sequence
  Synthetic polynucleotide encoding artificial human antibody CDR-H2 region
attagtggtgatggtcgtagcaca

SEQ ID NO: 3372 - DNA, 24 bp, Artificial Sequence
  Synthetic polynucleotide encoding artificial human antibody CDR-H2 region
atatcagatgatggaaaaaataaa

SEQ ID NO: 3373 - DNA, 24 bp, Artificial Sequence
  Synthetic polynucleotide encoding artificial human antibody CDR-H2 region
ataaagcaagatgggagtgagaaa

SEQ ID NO: 3374 - DNA, 24 bp, Artificial Sequence
  Synthetic polynucleotide encoding artificial human antibody CDR-H2 region
atttccagtgatgggagtaccaca

SEQ ID NO: 3375 - DNA, 30 bp, Artificial Sequence
  Synthetic polynucleotide encoding artificial human antibody CDR-H2 region
attaggagcaaaaccgatggtgggactaca

SEQ ID NO: 3376 - DNA, 21 bp, Artificial Sequence
  Synthetic polynucleotide encoding artificial human antibody CDR-H2 region
atctctgacattggggacacc

SEQ ID NO: 3377 - DNA, 24 bp, Artificial Sequence
  Synthetic polynucleotide encoding artificial human antibody CDR-H2 region
atcatccccatctttggtacagca

SEQ ID NO: 3378 - DNA, 21 bp, Artificial Sequence
  Synthetic polynucleotide encoding artificial human antibody CDR-H2 region
atctattttagtgggaaaact

SEQ ID NO: 3379 - DNA, 24 bp, Artificial Sequence
  Synthetic polynucleotide encoding artificial human antibody CDR-H2 region
attaatcgtgatgggagttacaca

SEQ ID NO: 3380 - DNA, 21 bp, Artificial Sequence
  Synthetic polynucleotide encoding artificial human antibody CDR-H2 region
gtctattatagtgggagcacc

SEQ ID NO: 3381 - DNA, 21 bp, Artificial Sequence
  Synthetic polynucleotide encoding artificial human antibody CDR-H2 region
gtgtctcccagcgggactaac

SEQ ID NO: 3382 - DNA, 24 bp, Artificial Sequence
  Synthetic polynucleotide encoding artificial human antibody CDR-H2 region
atcatccctattgttggagaagca

SEQ ID NO: 3383 - DNA, 24 bp, Artificial Sequence
  Synthetic polynucleotide encoding artificial human antibody CDR-H2 region
attaatagtgatgggagtagcaca

SEQ ID NO: 3384 - DNA, 21 bp, Artificial Sequence
  Synthetic polynucleotide encoding artificial human antibody CDR-H2 region
atctattacaatgggagcacc

SEQ ID NO: 3385 - DNA, 24 bp, Artificial Sequence
  Synthetic polynucleotide encoding artificial human antibody CDR-H2 region
attagtggtagtggtggtagcaca

SEQ ID NO: 3386 - DNA, 24 bp, Artificial Sequence
  Synthetic polynucleotide encoding artificial human antibody CDR-H2 region
attagtgccagtggtcgtaccaca

SEQ ID NO: 3387 - DNA, 24 bp, Artificial Sequence
  Synthetic polynucleotide encoding artificial human antibody CDR-H2 region
attactgctaatgggggtagcaca

SEQ ID NO: 3388 - DNA, 21 bp, Artificial Sequence
  Synthetic polynucleotide encoding artificial human antibody CDR-H2 region
atctatcatagggggacctcc

SEQ ID NO: 3389 - DNA, 24 bp, Artificial Sequence
  Synthetic polynucleotide encoding artificial human antibody CDR-H2 region
atctcatttgatggaagcaatcaa

SEQ ID NO: 3390 - DNA, 24 bp, Artificial Sequence
  Synthetic polynucleotide encoding artificial human antibody CDR-H2 region
atcgaccctagtggcggcagcaga

SEQ ID NO: 3391 - DNA, 24 bp, Artificial Sequence
  Synthetic polynucleotide encoding artificial human antibody CDR-H2 region
attaatactgatgggagtagcaca

SEQ ID NO: 3392 - DNA, 24 bp, Artificial Sequence
  Synthetic polynucleotide encoding artificial human antibody CDR-H2 region
tttgatcctgaaggtggtgaaaca

SEQ ID NO: 3393 - DNA, 21 bp, Artificial Sequence
  Synthetic polynucleotide encoding artificial human antibody CDR-H2 region
atctattataatggagacacc

SEQ ID NO: 3394 - DNA, 24 bp, Artificial Sequence
  Synthetic polynucleotide encoding artificial human antibody CDR-H2 region
atcagcgcttacactggtaacaca

SEQ ID NO: 3395 - DNA, 24 bp, Artificial Sequence
  Synthetic polynucleotide encoding artificial human antibody CDR-H2 region
attatttggaatagtggtacgaca

SEQ ID NO: 3396 - DNA, 24 bp, Artificial Sequence
  Synthetic polynucleotide encoding artificial human antibody CDR-H2 region
ataaatactgatggtagtcgagga

SEQ ID NO: 3397 - DNA, 21 bp, Artificial Sequence
  Synthetic polynucleotide encoding artificial human antibody CDR-H2 region
atttatcacagtggcagcacc

SEQ ID NO: 3398 - DNA, 30 bp, Artificial Sequence
  Synthetic polynucleotide encoding artificial human antibody CDR-H2 region
attaaaagtaaaagtgatggtgggtcaaca

SEQ ID NO: 3399 - DNA, 21 bp, Artificial Sequence
  Synthetic polynucleotide encoding artificial human antibody CDR-H2 region
atttatagcggtggtaccaca

SEQ ID NO: 3400 - DNA, 30 bp, Artificial Sequence
  Synthetic polynucleotide encoding artificial human antibody CDR-H2 region
attaaaaacagagctaacagttacaacaca

SEQ ID NO: 3401 - DNA, 24 bp, Artificial Sequence
  Synthetic polynucleotide encoding artificial human antibody CDR-H2 region
atatcttttgatggaagtgataaa

SEQ ID NO: 3402 - DNA, 24 bp, Artificial Sequence
  Synthetic polynucleotide encoding artificial human antibody CDR-H2 region
attactgctggtggaagtttcata

SEQ ID NO: 3403 - DNA, 24 bp, Artificial Sequence
  Synthetic polynucleotide encoding artificial human antibody CDR-H2 region
atcaaccctaatagtggtggcaca

SEQ ID NO: 3404 - DNA, 24 bp, Artificial Sequence
  Synthetic polynucleotide encoding artificial human antibody CDR-H2 region
attagttatagtggtggtagcaca

SEQ ID NO: 3405 - DNA, 24 bp, Artificial Sequence
  Synthetic polynucleotide encoding artificial human antibody CDR-H2 region
attagtagtagtggtggtgacatc

SEQ ID NO: 3406 - DNA, 24 bp, Artificial Sequence
  Synthetic polynucleotide encoding artificial human antibody CDR-H2 region
attagttggaatagtggtgacata

SEQ ID NO: 3407 - DNA, 6 bp, Artificial Sequence
  Synthetic polynucleotide encoding artificial human antibody CDR-H2 region
atggca

SEQ ID NO: 3408 - DNA, 24 bp, Artificial Sequence
  Synthetic polynucleotide encoding artificial human antibody CDR-H2 region
attggtggtagtggtggttacaca

SEQ ID NO: 3409 - DNA, 21 bp, Artificial Sequence
  Synthetic polynucleotide encoding artificial human antibody CDR-H2 region
atctttcacagtgggagcgcc

SEQ ID NO: 3410 - DNA, 24 bp, Artificial Sequence
  Synthetic polynucleotide encoding artificial human antibody CDR-H2 region
atgatcaccacttttggaaaagcg

SEQ ID NO: 3411 - DNA, 21 bp, Artificial Sequence
  Synthetic polynucleotide encoding artificial human antibody CDR-H2 region
atctattacagtgggagcacc

SEQ ID NO: 3412 - DNA, 24 bp, Artificial Sequence
  Synthetic polynucleotide encoding artificial human antibody CDR-H2 region
atcagcgcttacaatgggaacaca

SEQ ID NO: 3413 - DNA, 24 bp, Artificial Sequence
  Synthetic polynucleotide encoding artificial human antibody CDR-H2 region
atcaacaccgtcactgggatccca

SEQ ID NO: 3414 - DNA, 21 bp, Artificial Sequence
  Synthetic polynucleotide encoding artificial human antibody CDR-H2 region
gtctattatagtgggagcacc

SEQ ID NO: 3415 - DNA, 24 bp, Artificial Sequence
  Synthetic polynucleotide encoding artificial human antibody CDR-H2 region
atagcctatgatggaagtcagaaa

SEQ ID NO: 3416 - DNA, 24 bp, Artificial Sequence
  Synthetic polynucleotide encoding artificial human antibody CDR-H2 region
atcatccctgtttttggaacaaca

SEQ ID NO: 3417 - DNA, 24 bp, Artificial Sequence
  Synthetic polynucleotide encoding artificial human antibody CDR-H2 region
atcaacgctggcaatggtgacacg

SEQ ID NO: 3418 - DNA, 21 bp, Artificial Sequence
  Synthetic polynucleotide encoding artificial human antibody CDR-H2 region
atctatcatagtgggagcacc

SEQ ID NO: 3419 - DNA, 24 bp, Artificial Sequence
  Synthetic polynucleotide encoding artificial human antibody CDR-H2 region
gtagagggataccgaagtgaagaa

SEQ ID NO: 3420 - DNA, 24 bp, Artificial Sequence
  Synthetic polynucleotide encoding artificial human antibody CDR-H2 region
attagtgccagtggcggtggcacc

SEQ ID NO: 3421 - DNA, 21 bp, Artificial Sequence
  Synthetic polynucleotide encoding artificial human antibody CDR-H2 region
atctattacagtgggacctcc

SEQ ID NO: 3422 - DNA, 24 bp, Artificial Sequence
  Synthetic polynucleotide encoding artificial human antibody CDR-H2 region
atcaaccctaaaactggtgacaca

SEQ ID NO: 3423 - DNA, 24 bp, Artificial Sequence
  Synthetic polynucleotide encoding artificial human antibody CDR-H2 region
atatcatatgatggaagtaataaa

SEQ ID NO: 3424 - DNA, 24 bp, Artificial Sequence
  Synthetic polynucleotide encoding artificial human antibody CDR-H2 region
attagtagtagtagtagttacata

SEQ ID NO: 3425 - DNA, 21 bp, Artificial Sequence
  Synthetic polynucleotide encoding artificial human antibody CDR-H2 region
atctattatagtgggagcacc

SEQ ID NO: 3426 - DNA, 30 bp, Artificial Sequence
  Synthetic polynucleotide encoding artificial human antibody CDR-H2 region
attaaaagcaaaactgatggtgggacaaca

SEQ ID NO: 3427 - DNA, 24 bp, Artificial Sequence
  Synthetic polynucleotide encoding artificial human antibody CDR-H2 region
atcaaccctagttttggaagcaca

SEQ ID NO: 3428 - DNA, 24 bp, Artificial Sequence
  Synthetic polynucleotide encoding artificial human antibody CDR-H2 region
atcatgcctatgtttggaagaaca

SEQ ID NO: 3429 - DNA, 24 bp, Artificial Sequence
  Synthetic polynucleotide encoding artificial human antibody CDR-H2 region
atcagcagtactggaaccaccaca

SEQ ID NO: 3430 - DNA, 24 bp, Artificial Sequence
  Synthetic polynucleotide encoding artificial human antibody CDR-H2 region
atatcaaatgacggaagtaataaa

SEQ ID NO: 3431 - DNA, 24 bp, Artificial Sequence
  Synthetic polynucleotide encoding artificial human antibody CDR-H2 region
atctatcctggtgactctgatacc

SEQ ID NO: 3432 - DNA, 24 bp, Artificial Sequence
  Synthetic polynucleotide encoding artificial human antibody CDR-H2 region
attagtcgggggagcagtgtgata

SEQ ID NO: 3433 - DNA, 21 bp, Artificial Sequence
  Synthetic polynucleotide encoding artificial human antibody CDR-H2 region
attttttcgaatgacgaaaaa

SEQ ID NO: 3434 - DNA, 24 bp, Artificial Sequence
  Synthetic polynucleotide encoding artificial human antibody CDR-H2 region
atcaaccctaacagtggtggcaca

SEQ ID NO: 3435 - DNA, 24 bp, Artificial Sequence
  Synthetic polynucleotide encoding artificial human antibody CDR-H2 region
atcagcgcttacaatggtaacaca

SEQ ID NO: 3436 - DNA, 27 bp, Artificial Sequence
  Synthetic polynucleotide encoding artificial human antibody CDR-H2 region
acattctacaggaccaagtggtatagt

SEQ ID NO: 3437 - DNA, 21 bp, Artificial Sequence
  Synthetic polynucleotide encoding artificial human antibody CDR-H2 region
atctgtcatagtgggagcacc

SEQ ID NO: 3438 - DNA, 21 bp, Artificial Sequence
  Synthetic polynucleotide encoding artificial human antibody CDR-H2 region
atttatagcggtggtagcaca

SEQ ID NO: 3439 - DNA, 24 bp, Artificial Sequence
  Synthetic polynucleotide encoding artificial human antibody CDR-H2 region
atcaaccctaatggtggtactact

SEQ ID NO: 3440 - DNA, 21 bp, Artificial Sequence
  Synthetic polynucleotide encoding artificial human antibody CDR-H2 region
atctattacagtgggagcacc

SEQ ID NO: 3441 - DNA, 21 bp, Artificial Sequence
  Synthetic polynucleotide encoding artificial human antibody CDR-H2 region
atccattatactgggagcacc

SEQ ID NO: 3442 - DNA, 24 bp, Artificial Sequence
  Synthetic polynucleotide encoding artificial human antibody CDR-H2 region
atatcatatgatggaagtaataaa

SEQ ID NO: 3443 - DNA, 24 bp, Artificial Sequence
  Synthetic polynucleotide encoding artificial human antibody CDR-H2 region
attagtggcagtggtggtagcaca

SEQ ID NO: 3444 - DNA, 21 bp, Artificial Sequence
  Synthetic polynucleotide encoding artificial human antibody CDR-H2 region
atctattatagtgggagcacc

SEQ ID NO: 3445 - DNA, 24 bp, Artificial Sequence
  Synthetic polynucleotide encoding artificial human antibody CDR-H2 region
atcaaccctaacagtggtggcaca

SEQ ID NO: 3446 - DNA, 24 bp, Artificial Sequence
  Synthetic polynucleotide encoding artificial human antibody CDR-H2 region
atcaatcctgctgactctgatacc

SEQ ID NO: 3447 - DNA, 24 bp, Artificial Sequence
  Synthetic polynucleotide encoding artificial human antibody CDR-H2 region
atctatcctgctgactctgatacc

SEQ ID NO: 3448 - DNA, 24 bp, Artificial Sequence
  Synthetic polynucleotide encoding artificial human antibody CDR-H2 region
atcagttatagtggtaataccaca

SEQ ID NO: 3449 - DNA, 24 bp, Artificial Sequence
  Synthetic polynucleotide encoding artificial human antibody CDR-H2 region
atcaaccctggtggtggtagcaca

SEQ ID NO: 3450 - DNA, 24 bp, Artificial Sequence
  Synthetic polynucleotide encoding artificial human antibody CDR-H2 region
attactagtcctggtggtcacaca

SEQ ID NO: 3451 - DNA, 24 bp, Artificial Sequence
  Synthetic polynucleotide encoding artificial human antibody CDR-H2 region
attagtggcagtggtggtagcaca

SEQ ID NO: 3452 - DNA, 24 bp, Artificial Sequence
  Synthetic polynucleotide encoding artificial human antibody CDR-H2 region
atcaaccctgtcaatggggtcaca

SEQ ID NO: 3453 - DNA, 24 bp, Artificial Sequence
  Synthetic polynucleotide encoding artificial human antibody CDR-H2 region
atcaacaccaacactgggaaccca

SEQ ID NO: 3454 - DNA, 24 bp, Artificial Sequence
  Synthetic polynucleotide encoding artificial human antibody CDR-H2 region
atttcatctgatggaagcaataaa

SEQ ID NO: 3455 - DNA, 24 bp, Artificial Sequence
  Synthetic polynucleotide encoding artificial human antibody CDR-H2 region
gttagtggaagtggttttaccact

SEQ ID NO: 3456 - DNA, 24 bp, Artificial Sequence
  Synthetic polynucleotide encoding artificial human antibody CDR-H2 region
attagtagtagtagtagttacata

SEQ ID NO: 3457 - DNA, 21 bp, Artificial Sequence
  Synthetic polynucleotide encoding artificial human antibody CDR-H2 region
attaattgggatgatgataag

SEQ ID NO: 3458 - DNA, 21 bp, Artificial Sequence
  Synthetic polynucleotide encoding artificial human antibody CDR-H2 region
atttattgggatgatgatacg

SEQ ID NO: 3459 - DNA, 21 bp, Artificial Sequence
  Synthetic polynucleotide encoding artificial human antibody CDR-H2 region
atctattacattgggaccacc

SEQ ID NO: 3460 - DNA, 24 bp, Artificial Sequence
  Synthetic polynucleotide encoding artificial human antibody CDR-H2 region
ataaaccaagatggaggtgagaaa

SEQ ID NO: 3461 - DNA, 24 bp, Artificial Sequence
  Synthetic polynucleotide encoding artificial human antibody CDR-H2 region
atcatccctgtctttggtccacca

SEQ ID NO: 3462 - DNA, 24 bp, Artificial Sequence
  Synthetic polynucleotide encoding artificial human antibody CDR-H2 region
atcgtccctatctttgatacaaca

SEQ ID NO: 3463 - DNA, 24 bp, Artificial Sequence
  Synthetic polynucleotide encoding artificial human antibody CDR-H2 region
atcaacgctggcaatgggaacaca

SEQ ID NO: 3464 - DNA, 24 bp, Artificial Sequence
  Synthetic polynucleotide encoding artificial human antibody CDR-H2 region
atcagcccttacaatggtaacata

SEQ ID NO: 3465 - DNA, 24 bp, Artificial Sequence
  Synthetic polynucleotide encoding artificial human antibody CDR-H2 region
attagtggtcctggtgaaagttca

SEQ ID NO: 3466 - DNA, 24 bp, Artificial Sequence
  Synthetic polynucleotide encoding artificial human antibody CDR-H2 region
atcaaccctagcggtggttacaca

SEQ ID NO: 3467 - DNA, 24 bp, Artificial Sequence
  Synthetic polynucleotide encoding artificial human antibody CDR-H2 region
gtctttcctggtgactctgatatc

SEQ ID NO: 3468 - DNA, 24 bp, Artificial Sequence
  Synthetic polynucleotide encoding artificial human antibody CDR-H2 region
atatggtatgatggaaccaacaag

SEQ ID NO: 3469 - DNA, 24 bp, Artificial Sequence
  Synthetic polynucleotide encoding artificial human antibody CDR-H2 region
attgatcctagtgactcttatacc

SEQ ID NO: 3470 - DNA, 24 bp, Artificial Sequence
  Synthetic polynucleotide encoding artificial human antibody CDR-H2 region
attagtggggatggtactcggaca

SEQ ID NO: 3471 - DNA, 24 bp, Artificial Sequence
  Synthetic polynucleotide encoding artificial human antibody CDR-H2 region
acttatcatcgcacaactaccacc

SEQ ID NO: 3472 - DNA, 24 bp, Artificial Sequence
  Synthetic polynucleotide encoding artificial human antibody CDR-H2 region
atcacccctaattctggcacacca

SEQ ID NO: 3473 - DNA, 30 bp, Artificial Sequence
  Synthetic polynucleotide encoding artificial human antibody CDR-H2 region
attagaagcaaagcttatggtgggacaaga

SEQ ID NO: 3474 - DNA, 24 bp, Artificial Sequence
  Synthetic polynucleotide encoding artificial human antibody CDR-H2 region
ataagcggttacaatggaagaaca

SEQ ID NO: 3475 - DNA, 24 bp, Artificial Sequence
  Synthetic polynucleotide encoding artificial human antibody CDR-H2 region
atgaacgcagatgggagtgagaaa

SEQ ID NO: 3476 - DNA, 24 bp, Artificial Sequence
  Synthetic polynucleotide encoding artificial human antibody CDR-H2 region
attagtagtagtagtagtaccata

SEQ ID NO: 3477 - DNA, 21 bp, Artificial Sequence
  Synthetic polynucleotide encoding artificial human antibody CDR-H2 region
atctactatagtgggagcacc

SEQ ID NO: 3478 - DNA, 21 bp, Artificial Sequence
  Synthetic polynucleotide encoding artificial human antibody CDR-H2 region
atgttttatggtgggagcacc

SEQ ID NO: 3479 - DNA, 24 bp, Artificial Sequence
  Synthetic polynucleotide encoding artificial human antibody CDR-H2 region
atatggtatgatggaagtaatgaa

SEQ ID NO: 3480 - DNA, 24 bp, Artificial Sequence
  Synthetic polynucleotide encoding artificial human antibody CDR-H2 region
atcagcactgacagtggtaacaca

SEQ ID NO: 3481 - DNA, 24 bp, Artificial Sequence
  Synthetic polynucleotide encoding artificial human antibody CDR-H2 region
attcattggaatggtggtagcaca

SEQ ID NO: 3482 - DNA, 24 bp, Artificial Sequence
  Synthetic polynucleotide encoding artificial human antibody CDR-H2 region
atgtggtatgatggaaataataaa

SEQ ID NO: 3483 - DNA, 24 bp, Artificial Sequence
  Synthetic polynucleotide encoding artificial human antibody CDR-H2 region
attagtggcagtggtggtcggaca

SEQ ID NO: 3484 - DNA, 30 bp, Artificial Sequence
  Synthetic polynucleotide encoding artificial human antibody CDR-H2 region
attaaaaccaaaactgatggtgggacaaca

SEQ ID NO: 3485 - DNA, 24 bp, Artificial Sequence
  Synthetic polynucleotide encoding artificial human antibody CDR-H2 region
atttggcatgatggcagtaagacg

SEQ ID NO: 3486 - DNA, 24 bp, Artificial Sequence
  Synthetic polynucleotide encoding artificial human antibody CDR-H2 region
attagcccttacacccgtcagaca

SEQ ID NO: 3487 - DNA, 24 bp, Artificial Sequence
  Synthetic polynucleotide encoding artificial human antibody CDR-H2 region
acacgttttgatggaagtgaaaaa

SEQ ID NO: 3488 - DNA, 24 bp, Artificial Sequence
  Synthetic polynucleotide encoding artificial human antibody CDR-H2 region
atatcacatgatggaagtaataac

SEQ ID NO: 3489 - DNA, 24 bp, Artificial Sequence
  Synthetic polynucleotide encoding artificial human antibody CDR-H2 region
atccacgttggaaatgatcacaca

SEQ ID NO: 3490 - DNA, 24 bp, Artificial Sequence
  Synthetic polynucleotide encoding artificial human antibody CDR-H2 region
tttgatcctagtgactcttataac

SEQ ID NO: 3491 - DNA, 21 bp, Artificial Sequence
  Synthetic polynucleotide encoding artificial human antibody CDR-H2 region
atttattgggatgatgataag

SEQ ID NO: 3492 - DNA, 24 bp, Artificial Sequence
  Synthetic polynucleotide encoding artificial human antibody CDR-H2 region
attagtggagatagtcgtgacatc

SEQ ID NO: 3493 - DNA, 24 bp, Artificial Sequence
  Synthetic polynucleotide encoding artificial human antibody CDR-H2 region
atcatacctgtcctaggtatacca

SEQ ID NO: 3494 - DNA, 21 bp, Artificial Sequence
  Synthetic polynucleotide encoding artificial human antibody CDR-H2 region
gtctattacagtgggaacacc

SEQ ID NO: 3495 - DNA, 24 bp, Artificial Sequence
  Synthetic polynucleotide encoding artificial human antibody CDR-H2 region
attagtagtaatgggggtagcaca

SEQ ID NO: 3496 - DNA, 24 bp, Artificial Sequence
  Synthetic polynucleotide encoding artificial human antibody CDR-H2 region
attagtagtagtaggagtaccata

SEQ ID NO: 3497 - DNA, 21 bp, Artificial Sequence
  Synthetic polynucleotide encoding artificial human antibody CDR-H2 region
atcattcatactgggaccacc

SEQ ID NO: 3498 - DNA, 24 bp, Artificial Sequence
  Synthetic polynucleotide encoding artificial human antibody CDR-H2 region
attaatactgatgggactgtcaca

SEQ ID NO: 3499 - DNA, 21 bp, Artificial Sequence
  Synthetic polynucleotide encoding artificial human antibody CDR-H2 region
atttattgggatgatgataag

SEQ ID NO: 3500 - DNA, 24 bp, Artificial Sequence
  Synthetic polynucleotide encoding artificial human antibody CDR-H2 region
atatcatatgatggaagtaataaa

SEQ ID NO: 3501 - DNA, 24 bp, Artificial Sequence
  Synthetic polynucleotide encoding artificial human antibody CDR-H2 region
attagtagtagtggtagtaccata

SEQ ID NO: 3502 - DNA, 24 bp, Artificial Sequence
  Synthetic polynucleotide encoding artificial human antibody CDR-H2 region
attagtagtagtagtagtaccata

SEQ ID NO: 3503 - DNA, 21 bp, Artificial Sequence
  Synthetic polynucleotide encoding artificial human antibody CDR-H2 region
attgattgggatgatgataaa

SEQ ID NO: 3504 - DNA, 24 bp, Artificial Sequence
  Synthetic polynucleotide encoding artificial human antibody CDR-H2 region
ataaagcaagatggaagtgagaaa

SEQ ID NO: 3505 - DNA, 24 bp, Artificial Sequence
  Synthetic polynucleotide encoding artificial human antibody CDR-H2 region
tttgttggtagcggtgacaccaca

SEQ ID NO: 3506 - DNA, 24 bp, Artificial Sequence
  Synthetic polynucleotide encoding artificial human antibody CDR-H2 region
attagtagtagtagtagtaccaaa

SEQ ID NO: 3507 - DNA, 24 bp, Artificial Sequence
  Synthetic polynucleotide encoding artificial human antibody CDR-H2 region
atcaaccctaagactggtgccaca

SEQ ID NO: 3508 - DNA, 21 bp, Artificial Sequence
  Synthetic polynucleotide encoding artificial human antibody CDR-H2 region
atctatgccagtgggagcacc

SEQ ID NO: 3509 - DNA, 24 bp, Artificial Sequence
  Synthetic polynucleotide encoding artificial human antibody CDR-H2 region
atctatcctggtgactctgatacc

SEQ ID NO: 3510 - DNA, 30 bp, Artificial Sequence; identical to SEQ ID NO: 3426
  Synthetic polynucleotide encoding artificial human antibody CDR-H2 region

SEQ ID NO: 3511 - DNA, 24 bp, Artificial Sequence
  Synthetic polynucleotide encoding artificial human antibody CDR-H2 region
atatcaaaagatggaaacagcaaa

SEQ ID NO: 3512 - DNA, 30 bp, Artificial Sequence
  Synthetic polynucleotide encoding artificial human antibody CDR-H2 region
attagaagcaaaactaagaattacgcgaca

SEQ ID NO: 3513 - DNA, 21 bp, Artificial Sequence
  Synthetic polynucleotide encoding artificial human antibody CDR-H2 region
atctacaccagtgggagcacc

SEQ ID NO: 3514 - DNA, 30 bp, Artificial Sequence
  Synthetic polynucleotide encoding artificial human antibody CDR-H2 region
attagtaccaaaggttatgatgagacagca

SEQ ID NO: 3515 - DNA, 24 bp, Artificial Sequence
  Synthetic polynucleotide encoding artificial human antibody CDR-H2 region
ataccgtatgatggaagtaataaa

SEQ ID NO: 3516 - DNA, 24 bp, Artificial Sequence
  Synthetic polynucleotide encoding artificial human antibody CDR-H2 region
atcagtactagtacaagtaccata

SEQ ID NO: 3517 - DNA, 24 bp, Artificial Sequence
  Synthetic polynucleotide encoding artificial human antibody CDR-H2 region
attagtagtagtggtagtaccata

SEQ ID NO: 3518 - DNA, 24 bp, Artificial Sequence
  Synthetic polynucleotide encoding artificial human antibody CDR-H2 region
attagtagtagtagtagtaccata

SEQ ID NO: 3519 - DNA, 21 bp, Artificial Sequence
  Synthetic polynucleotide encoding artificial human antibody CDR-H2 region
atgtacagtggtggcgccaca

SEQ ID NO: 3520 - DNA, 24 bp, Artificial Sequence
  Synthetic polynucleotide encoding artificial human antibody CDR-H2 region
atctatcctggtgactctgatacc

SEQ ID NO: 3521 - DNA, 30 bp, Artificial Sequence
  Synthetic polynucleotide encoding artificial human antibody CDR-H2 region
attagaagtaaacctaacagttacgcgaca

SEQ ID NO: 3522 - DNA, 24 bp, Artificial Sequence
  Synthetic polynucleotide encoding artificial human antibody CDR-H2 region
atatggtatgatggaagtaatgag

SEQ ID NO: 3523 - DNA, 24 bp, Artificial Sequence
  Synthetic polynucleotide encoding artificial human antibody CDR-H2 region
atatggtatgatggaagtaataaa

SEQ ID NO: 3524 - DNA, 9 bp, Artificial Sequence
  Synthetic polynucleotide encoding artificial human antibody CDR-L2 region
agtgcatcc

SEQ ID NO: 3525 - DNA, 9 bp, Artificial Sequence
  Synthetic polynucleotide encoding artificial human antibody CDR-L2 region
gctgcatcc

SEQ ID NO: 3526 - DNA, 9 bp, Artificial Sequence
  Synthetic polynucleotide encoding artificial human antibody CDR-L2 region
actgcatcc

SEQ ID NO: 3527 - DNA, 9 bp, Artificial Sequence
  Synthetic polynucleotide encoding artificial human antibody CDR-L2 region
aggaataat

SEQ ID NO: 3528 - DNA, 9 bp, Artificial Sequence
  Synthetic polynucleotide encoding artificial human antibody CDR-L2 region
ggtaaaaac

SEQ ID NO: 3529 - DNA, 9 bp, Artificial Sequence
  Synthetic polynucleotide encoding artificial human antibody CDR-L2 region
tatgatagc

SEQ ID NO: 3530 - DNA, 9 bp, Artificial Sequence
  Synthetic polynucleotide encoding artificial human antibody CDR-L2 region
gctgcatcc

SEQ ID NO: 3531 - DNA, 9 bp, Artificial Sequence
  Synthetic polynucleotide encoding artificial human antibody CDR-L2 region
gatgcatcc

SEQ ID NO: 3532 - DNA, 9 bp, Artificial Sequence
  Synthetic polynucleotide encoding artificial human antibody CDR-L2 region
gaggatgac

SEQ ID NO: 3533 - DNA, 9 bp, Artificial Sequence
  Synthetic polynucleotide encoding artificial human antibody CDR-L2 region
ggtgcatcc

SEQ ID NO: 3534 - DNA, 9 bp, Artificial Sequence
  Synthetic polynucleotide encoding artificial human antibody CDR-L2 region
gaaaataat

SEQ ID NO: 3535 - DNA, 9 bp, Artificial Sequence
  Synthetic polynucleotide encoding artificial human antibody CDR-L2 region
atggtttct

SEQ ID NO: 3536 - DNA, 9 bp, Artificial Sequence
  Synthetic polynucleotide encoding artificial human antibody CDR-L2 region
agggataat

SEQ ID NO: 3537 - DNA, 9 bp, Artificial Sequence
  Synthetic polynucleotide encoding artificial human antibody CDR-L2 region
agtagtagt

SEQ ID NO: 3538 - DNA, 9 bp, Artificial Sequence
  Synthetic polynucleotide encoding artificial human antibody CDR-L2 region
gatgcatcc

SEQ ID NO: 3539 - DNA, 9 bp, Artificial Sequence
  Synthetic polynucleotide encoding artificial human antibody CDR-L2 region
ggtgcatcc

SEQ ID NO: 3540 - DNA, 9 bp, Artificial Sequence
  Synthetic polynucleotide encoding artificial human antibody CDR-L2 region
aaagacagt

SEQ ID NO: 3541 - DNA, 9 bp, Artificial Sequence
  Synthetic polynucleotide encoding artificial human antibody CDR-L2 region
gatgcatcc

SEQ ID NO: 3542 - DNA, 9 bp, Artificial Sequence
  Synthetic polynucleotide encoding artificial human antibody CDR-L2 region
gatgcatcc

SEQ ID NO: 3543 - DNA, 9 bp, Artificial Sequence
  Synthetic polynucleotide encoding artificial human antibody CDR-L2 region
gctgcatcc

SEQ ID NO: 3544 - DNA, 9 bp, Artificial Sequence
  Synthetic polynucleotide encoding artificial human antibody CDR-L2 region
tgggcatct

SEQ ID NO: 3545 - DNA, 9 bp, Artificial Sequence
  Synthetic polynucleotide encoding artificial human antibody CDR-L2 region
ggtgcatcc

SEQ ID NO: 3546 - DNA, 9 bp, Artificial Sequence
  Synthetic polynucleotide encoding artificial human antibody CDR-L2 region
gaggtcagt

SEQ ID NO: 3547 - DNA, 9 bp, Artificial Sequence
  Synthetic polynucleotide encoding artificial human antibody CDR-L2 region
aggattgat

SEQ ID NO: 3548 - DNA, 9 bp, Artificial Sequence
  Synthetic polynucleotide encoding artificial human antibody CDR-L2 region
gctgcatcc

SEQ ID NO: 3549 - DNA, 9 bp, Artificial Sequence
  Synthetic polynucleotide encoding artificial human antibody CDR-L2 region
gctgcatcc

SEQ ID NO: 3550 - DNA, 9 bp, Artificial Sequence
  Synthetic polynucleotide encoding artificial human antibody CDR-L2 region
ggtgacagc

SEQ ID NO: 3551 - DNA, 9 bp, Artificial Sequence
  Synthetic polynucleotide encoding artificial human antibody CDR-L2 region
gatgatagc

SEQ ID NO: 3552 - DNA, 9 bp, Artificial Sequence
  Synthetic polynucleotide encoding artificial human antibody CDR-L2 region
gctgcatcc

SEQ ID NO: 3553 - DNA, 9 bp, Artificial Sequence
  Synthetic polynucleotide encoding artificial human antibody CDR-L2 region
gaggacatt

SEQ ID NO: 3554 - DNA, 9 bp, Artificial Sequence
  Synthetic polynucleotide encoding artificial human antibody CDR-L2 region
gaggtcagt

SEQ ID NO: 3555 - DNA, 9 bp, Artificial Sequence
  Synthetic polynucleotide encoding artificial human antibody CDR-L2 region
gacaataat

SEQ ID NO: 3556 - DNA, 9 bp, Artificial Sequence
  Synthetic polynucleotide encoding artificial human antibody CDR-L2 region
aaggtttct

SEQ ID NO: 3557 - DNA, 9 bp, Artificial Sequence
  Synthetic polynucleotide encoding artificial human antibody CDR-L2 region
ggtgcatcc

SEQ ID NO: 3558 - DNA, 9 bp, Artificial Sequence
  Synthetic polynucleotide encoding artificial human antibody CDR-L2 region
ggtaacatc

SEQ ID NO: 3559 - DNA, 9 bp, Artificial Sequence
  Synthetic polynucleotide encoding artificial human antibody CDR-L2 region
gctgcatcc

SEQ ID NO: 3560 - DNA, 9 bp, Artificial Sequence
  Synthetic polynucleotide encoding artificial human antibody CDR-L2 region
tgggcatct

SEQ ID NO: 3561 - DNA, 9 bp, Artificial Sequence
  Synthetic polynucleotide encoding artificial human antibody CDR-L2 region
cgtaacaac

SEQ ID NO: 3562 - DNA, 9 bp, Artificial Sequence
  Synthetic polynucleotide encoding artificial human antibody CDR-L2 region
gaggataaa

SEQ ID NO: 3563 - DNA, 9 bp, Artificial Sequence
  Synthetic polynucleotide encoding artificial human antibody CDR-L2 region
gctgcatcc

SEQ ID NO: 3564 - DNA, 9 bp, Artificial Sequence
  Synthetic polynucleotide encoding artificial human antibody CDR-L2 region
tatgatagc

SEQ ID NO: 3565 - DNA, 9 bp, Artificial Sequence
  Synthetic polynucleotide encoding artificial human antibody CDR-L2 region
gatgtcagt

SEQ ID NO: 3566 - DNA, 9 bp, Artificial Sequence
  Synthetic polynucleotide encoding artificial human antibody CDR-L2 region
gctgcatcc

SEQ ID NO: 3567 - DNA, 9 bp, Artificial Sequence
  Synthetic polynucleotide encoding artificial human antibody CDR-L2 region
gctgcctcc

SEQ ID NO: 3568 - DNA, 9 bp, Artificial Sequence
  Synthetic polynucleotide encoding artificial human antibody CDR-L2 region
ggtgaaaac

SEQ ID NO: 3569 - DNA, 9 bp, Artificial Sequence
  Synthetic polynucleotide encoding artificial human antibody CDR-L2 region
gctgcatcc

SEQ ID NO: 3570 - DNA, 9 bp, Artificial Sequence
  Synthetic polynucleotide encoding artificial human antibody CDR-L2 region
gctgcatcc

SEQ ID NO: 3571 - DNA, 9 bp, Artificial Sequence
  Synthetic polynucleotide encoding artificial human antibody CDR-L2 region
ggtgcatcc

SEQ ID NO: 3572 - DNA, 9 bp, Artificial Sequence
  Synthetic polynucleotide encoding artificial human antibody CDR-L2 region
ggtgcatcc

SEQ ID NO: 3573 - DNA, 9 bp, Artificial Sequence
  Synthetic polynucleotide encoding artificial human antibody CDR-L2 region
gattcatcc

SEQ ID NO: 3574 - DNA, 9 bp, Artificial Sequence
  Synthetic polynucleotide encoding artificial human antibody CDR-L2 region
aaggcatct

SEQ ID NO: 3575 - DNA, 9 bp, Artificial Sequence
  Synthetic polynucleotide encoding artificial human antibody CDR-L2 region
tatgatagc

SEQ ID NO: 3576 - DNA, 9 bp, Artificial Sequence
  Synthetic polynucleotide encoding artificial human antibody CDR-L2 region
gatgcatcc

SEQ ID NO: 3577 - DNA, 9 bp, Artificial Sequence
  Synthetic polynucleotide encoding artificial human antibody CDR-L2 region
ttggggtct

SEQ ID NO: 3578 - DNA, 9 bp, Artificial Sequence
  Synthetic polynucleotide encoding artificial human antibody CDR-L2 region
aaggcgtct

SEQ ID NO: 3579 - DNA, 9 bp, Artificial Sequence
  Synthetic polynucleotide encoding artificial human antibody CDR-L2 region
aacattaat

SEQ ID NO: 3580 - DNA, 9 bp, Artificial Sequence
  Synthetic polynucleotide encoding artificial human antibody CDR-L2 region
ggtgcatcc

SEQ ID NO: 3581 - DNA, 9 bp, Artificial Sequence
  Synthetic polynucleotide encoding artificial human antibody CDR-L2 region
gctgataga

SEQ ID NO: 3582 - DNA, 9 bp, Artificial Sequence
  Synthetic polynucleotide encoding artificial human antibody CDR-L2 region
aaggcgtct

SEQ ID NO: 3583 - DNA, 9 bp, Artificial Sequence
  Synthetic polynucleotide encoding artificial human antibody CDR-L2 region
gaagctact

SEQ ID NO: 3584 - DNA, 9 bp, Artificial Sequence
  Synthetic polynucleotide encoding artificial human antibody CDR-L2 region
ggtgcatcc

SEQ ID NO: 3585 - DNA, 9 bp, Artificial Sequence
  Synthetic polynucleotide encoding artificial human antibody CDR-L2 region
gaggacagc

SEQ ID NO: 3586 - DNA, 9 bp, Artificial Sequence
  Synthetic polynucleotide encoding artificial human antibody CDR-L2 region
ttgggttct

SEQ ID NO: 3587 - DNA, 9 bp, Artificial Sequence
  Synthetic polynucleotide encoding artificial human antibody CDR-L2 region
gaggtcaag

SEQ ID NO: 3588 - DNA, 9 bp, Artificial Sequence
  Synthetic polynucleotide encoding artificial human antibody CDR-L2 region
gatgcatcc

SEQ ID NO: 3589 - DNA, 9 bp, Artificial Sequence
  Synthetic polynucleotide encoding artificial human antibody CDR-L2 region
gatgtcagt

SEQ ID NO: 3590 - DNA, 9 bp, Artificial Sequence
  Synthetic polynucleotide encoding artificial human antibody CDR-L2 region
gaagtttcc

SEQ ID NO: 3591 - DNA, 9 bp, Artificial Sequence
  Synthetic polynucleotide encoding artificial human antibody CDR-L2 region
ggcgcatcc

SEQ ID NO: 3592 - DNA, 9 bp, Artificial Sequence
  Synthetic polynucleotide encoding artificial human antibody CDR-L2 region
gctgcatcc

SEQ ID NO: 3593 - DNA, 9 bp, Artificial Sequence
  Synthetic polynucleotide encoding artificial human antibody CDR-L2 region
gacaataac

SEQ ID NO: 3594 - DNA, 9 bp, Artificial Sequence
  Synthetic polynucleotide encoding artificial human antibody CDR-L2 region
gatgtgtcc

SEQ ID NO: 3595 - DNA, 9 bp, Artificial Sequence
  Synthetic polynucleotide encoding artificial human antibody CDR-L2 region
ggtgcatcc

SEQ ID NO: 3596 - DNA, 9 bp, Artificial Sequence
  Synthetic polynucleotide encoding artificial human antibody CDR-L2 region
aaggcgtct

SEQ ID NO: 3597 - DNA, 9 bp, Artificial Sequence
  Synthetic polynucleotide encoding artificial human antibody CDR-L2 region
ggtaaaaac

SEQ ID NO: 3598 - DNA, 9 bp, Artificial Sequence
  Synthetic polynucleotide encoding artificial human antibody CDR-L2 region
gctgcatcc

SEQ ID NO: 3599 - DNA, 9 bp, Artificial Sequence
  Synthetic polynucleotide encoding artificial human antibody CDR-L2 region
gatgcatcc

SEQ ID NO: 3600 - DNA, 9 bp, Artificial Sequence
  Synthetic polynucleotide encoding artificial human antibody CDR-L2 region
gaaaataat

SEQ ID NO: 3601 - DNA, 9 bp, Artificial Sequence
  Synthetic polynucleotide encoding artificial human antibody CDR-L2 region
gctgcatcc

SEQ ID NO: 3602 - DNA, 9 bp, Artificial Sequence
  Synthetic polynucleotide encoding artificial human antibody CDR-L2 region
tgggcttct

SEQ ID NO: 3603 - DNA, 9 bp, Artificial Sequence
  Synthetic polynucleotide encoding artificial human antibody CDR-L2 region
gacgcatct

SEQ ID NO: 3604 - DNA, 9 bp, Artificial Sequence
  Synthetic polynucleotide encoding artificial human antibody CDR-L2 region
gctgcatcc

SEQ ID NO: 3605 - DNA, 9 bp, Artificial Sequence
  Synthetic polynucleotide encoding artificial human antibody CDR-L2 region
ggtaacatc

SEQ ID NO: 3606 - DNA, 9 bp, Artificial Sequence
  Synthetic polynucleotide encoding artificial human antibody CDR-L2 region
ggtgcatcc

SEQ ID NO: 3607 - DNA, 9 bp, Artificial Sequence
  Synthetic polynucleotide encoding artificial human antibody CDR-L2 region
gacgcatcc

SEQ ID NO: 3608 - DNA, 9 bp, Artificial Sequence
  Synthetic polynucleotide encoding artificial human antibody CDR-L2 region
aatgatcat

SEQ ID NO: 3609 - DNA, 9 bp, Artificial Sequence
  Synthetic polynucleotide encoding artificial human antibody CDR-L2 region
acggtttcc

SEQ ID NO: 3610 - DNA, 9 bp, Artificial Sequence
  Synthetic polynucleotide encoding artificial human antibody CDR-L2 region
caagatagc

SEQ ID NO: 3611 - DNA, 9 bp, Artificial Sequence
  Synthetic polynucleotide encoding artificial human antibody CDR-L2 region
caacataac

SEQ ID NO: 3612 - DNA, 9 bp, Artificial Sequence
  Synthetic polynucleotide encoding artificial human antibody CDR-L2 region
tgggcatct

SEQ ID NO: 3613 - DNA, 9 bp, Artificial Sequence
  Synthetic polynucleotide encoding artificial human antibody CDR-L2 region
gatgcatcc

SEQ ID NO: 3614 - DNA, 9 bp, Artificial Sequence
  Synthetic polynucleotide encoding artificial human antibody CDR-L2 region
gatgcatcc

SEQ ID NO: 3615 - DNA, 9 bp, Artificial Sequence
  Synthetic polynucleotide encoding artificial human antibody CDR-L2 region
ttgggttct

SEQ ID NO: 3616 - DNA, 9 bp, Artificial Sequence
  Synthetic polynucleotide encoding artificial human antibody CDR-L2 region
ttggtgtct

SEQ ID NO: 3617 - DNA, 9 bp, Artificial Sequence
  Synthetic polynucleotide encoding artificial human antibody CDR-L2 region
gacaatgat

SEQ ID NO: 3618 - DNA, 9 bp, Artificial Sequence
  Synthetic polynucleotide encoding artificial human antibody CDR-L2 region
gatgcatcc

SEQ ID NO: 3619 - DNA, 9 bp, Artificial Sequence
  Synthetic polynucleotide encoding artificial human antibody CDR-L2 region
ttgggttct

SEQ ID NO: 3620 - DNA, 9 bp, Artificial Sequence
  Synthetic polynucleotide encoding artificial human antibody CDR-L2 region
gatgtcagt

SEQ ID NO: 3621 - DNA, 9 bp, Artificial Sequence
  Synthetic polynucleotide encoding artificial human antibody CDR-L2 region
aaggtttct

SEQ ID NO: 3622 - DNA, 9 bp, Artificial Sequence
  Synthetic polynucleotide encoding artificial human antibody CDR-L2 region
gctgcatcc

SEQ ID NO: 3623 - DNA, 9 bp, Artificial Sequence
  Synthetic polynucleotide encoding artificial human antibody CDR-L2 region
gatgcatcc

SEQ ID NO: 3624 - DNA, 9 bp, Artificial Sequence
  Synthetic polynucleotide encoding artificial human antibody CDR-L2 region
gatgatagc

SEQ ID NO: 3625 - DNA, 9 bp, Artificial Sequence
  Synthetic polynucleotide encoding artificial human antibody CDR-L2 region
gctgcatcc

SEQ ID NO: 3626 - DNA, 9 bp, Artificial Sequence
  Synthetic polynucleotide encoding artificial human antibody CDR-L2 region
gttgcatcc

SEQ ID NO: 3627 - DNA, 9 bp, Artificial Sequence
  Synthetic polynucleotide encoding artificial human antibody CDR-L2 region
aaggcgtcc

SEQ ID NO: 3628 - DNA, 9 bp, Artificial Sequence
  Synthetic polynucleotide encoding artificial human antibody CDR-L2 region
gaactttcc

SEQ ID NO: 3629 - DNA, 9 bp, Artificial Sequence
  Synthetic polynucleotide encoding artificial human antibody CDR-L2 region
gctgcatcc

SEQ ID NO: 3630 - DNA, 9 bp, Artificial Sequence
  Synthetic polynucleotide encoding artificial human antibody CDR-L2 region
ggtaacaga

SEQ ID NO: 3631 - DNA, 9 bp, Artificial Sequence
  Synthetic polynucleotide encoding artificial human antibody CDR-L2 region
tatgcatcc

SEQ ID NO: 3632 - DNA, 9 bp, Artificial Sequence
  Synthetic polynucleotide encoding artificial human antibody CDR-L2 region
ggcgcgtcc

SEQ ID NO: 3633 - DNA, 9 bp, Artificial Sequence
  Synthetic polynucleotide encoding artificial human antibody CDR-L2 region
tcggcatct

SEQ ID NO: 3634 - DNA, 9 bp, Artificial Sequence
  Synthetic polynucleotide encoding artificial human antibody CDR-L2 region
gatgcatcc

SEQ ID NO: 3635 - DNA, 9 bp, Artificial Sequence
  Synthetic polynucleotide encoding artificial human antibody CDR-L2 region
gatgtcagt

SEQ ID NO: 3636 - DNA, 9 bp, Artificial Sequence
  Synthetic polynucleotide encoding artificial human antibody CDR-L2 region
gaggacagc

SEQ ID NO: 3637 - DNA, 9 bp, Artificial Sequence
  Synthetic polynucleotide encoding artificial human antibody CDR-L2 region
ggtgcatcc

SEQ ID NO: 3638 - DNA, 9 bp, Artificial Sequence
  Synthetic polynucleotide encoding artificial human antibody CDR-L2 region
ggtgcatcc

SEQ ID NO: 3639 - DNA, 9 bp, Artificial Sequence
  Synthetic polynucleotide encoding artificial human antibody CDR-L2 region
gatgtcaat

SEQ ID NO: 3640 - DNA, 9 bp, Artificial Sequence
  Synthetic polynucleotide encoding artificial human antibody CDR-L2 region
gcagacagc

SEQ ID NO: 3641 - DNA, 9 bp, Artificial Sequence
  Synthetic polynucleotide encoding artificial human antibody CDR-L2 region
gctgcatcc

SEQ ID NO: 3642 - DNA, 9 bp, Artificial Sequence
  Synthetic polynucleotide encoding artificial human antibody CDR-L2 region
aaaaataat

SEQ ID NO: 3643 - DNA, 9 bp, Artificial Sequence
  Synthetic polynucleotide encoding artificial human antibody CDR-L2 region
gaagcaact

SEQ ID NO: 3644 - DNA, 9 bp, Artificial Sequence
  Synthetic polynucleotide encoding artificial human antibody CDR-L2 region
gtggcgtct

SEQ ID NO: 3645 - DNA, 9 bp, Artificial Sequence
  Synthetic polynucleotide encoding artificial human antibody CDR-L2 region
gctgcatcc

SEQ ID NO: 3646 - DNA, 9 bp, Artificial Sequence
  Synthetic polynucleotide encoding artificial human antibody CDR-L2 region
ttcagaaac

SEQ ID NO: 3647 - DNA, 9 bp, Artificial Sequence
  Synthetic polynucleotide encoding artificial human antibody CDR-L2 region
gatacatcc

SEQ ID NO: 3648 - DNA, 9 bp, Artificial Sequence
  Synthetic polynucleotide encoding artificial human antibody CDR-L2 region
tatgatagc

SEQ ID NO: 3649 - DNA, 9 bp, Artificial Sequence
  Synthetic polynucleotide encoding artificial human antibody CDR-L2 region
gaggtcatt

SEQ ID NO: 3650 - DNA, 9 bp, Artificial Sequence
  Synthetic polynucleotide encoding artificial human antibody CDR-L2 region
gatgcattc

SEQ ID NO: 3651 - DNA, 9 bp, Artificial Sequence
  Synthetic polynucleotide encoding artificial human antibody CDR-L2 region
gataaagac

SEQ ID NO: 3652 - DNA, 9 bp, Artificial Sequence
  Synthetic polynucleotide encoding artificial human antibody CDR-L2 region
agtgcttcc

SEQ ID NO: 3653 - DNA, 9 bp, Artificial Sequence
  Synthetic polynucleotide encoding artificial human antibody CDR-L2 region
agggatgac

SEQ ID NO: 3654 - DNA, 9 bp, Artificial Sequence
  Synthetic polynucleotide encoding artificial human antibody CDR-L2 region
gatgatagc

SEQ ID NO: 3655 - DNA, 9 bp, Artificial Sequence
  Synthetic polynucleotide encoding artificial human antibody CDR-L2 region
aaagacact

SEQ ID NO: 3656 - DNA, 9 bp, Artificial Sequence
  Synthetic polynucleotide encoding artificial human antibody CDR-L2 region
aaagacagt

SEQ ID NO: 3657 - DNA, 9 bp, Artificial Sequence
  Synthetic polynucleotide encoding artificial human antibody CDR-L2 region
gaggacacc

SEQ ID NO: 3658 - DNA, 9 bp, Artificial Sequence
  Synthetic polynucleotide encoding artificial human antibody CDR-L2 region
gctgcatcc

SEQ ID NO: 3659 - DNA, 9 bp, Artificial Sequence
  Synthetic polynucleotide encoding artificial human antibody CDR-L2 region
gatgcatcc

SEQ ID NO: 3660 - DNA, 9 bp, Artificial Sequence
  Synthetic polynucleotide encoding artificial human antibody CDR-L2 region
gatgaatcc

SEQ ID NO: 3661 - DNA, 9 bp, Artificial Sequence
  Synthetic polynucleotide encoding artificial human antibody CDR-L2 region
gatgtcagt

SEQ ID NO: 3662 - DNA, 9 bp, Artificial Sequence
  Synthetic polynucleotide encoding artificial human antibody CDR-L2 region
caagatacc

SEQ ID NO: 3663 - DNA, 9 bp, Artificial Sequence
  Synthetic polynucleotide encoding artificial human antibody CDR-L2 region
gacaatgat

SEQ ID NO: 3664 - DNA, 9 bp, Artificial Sequence
  Synthetic polynucleotide encoding artificial human antibody CDR-L2 region
gctgcgtcc

SEQ ID NO: 3665 - DNA, 9 bp, Artificial Sequence
  Synthetic polynucleotide encoding artificial human antibody CDR-L2 region
ggtgcatcc

SEQ ID NO: 3666 - DNA, 9 bp, Artificial Sequence
  Synthetic polynucleotide encoding artificial human antibody CDR-L2 region
gacgtcagt

SEQ ID NO: 3667 - DNA, 9 bp, Artificial Sequence
  Synthetic polynucleotide encoding artificial human antibody CDR-L2 region
actgcgtcc

SEQ ID NO: 3668 - DNA, 9 bp, Artificial Sequence
  Synthetic polynucleotide encoding artificial human antibody CDR-L2 region
ggtgcatcc

SEQ ID NO: 3669 - DNA, 9 bp, Artificial Sequence
  Synthetic polynucleotide encoding artificial human antibody CDR-L2 region
aaagacaat

SEQ ID NO: 3670 - DNA, 9 bp, Artificial Sequence
  Synthetic polynucleotide encoding artificial human antibody CDR-L2 region
gatgtcatt

SEQ ID NO: 3671 - DNA, 9 bp, Artificial Sequence
  Synthetic polynucleotide encoding artificial human antibody CDR-L2 region
ggtgcatcc

SEQ ID NO: 3672 - DNA, 9 bp, Artificial Sequence
  Synthetic polynucleotide encoding artificial human antibody CDR-L2 region
tgggcgtct

SEQ ID NO: 3673 - DNA, 9 bp, Artificial Sequence
  Synthetic polynucleotide encoding artificial human antibody CDR-L2 region
cgtaacacc

SEQ ID NO: 3674 - DNA, 9 bp, Artificial Sequence
  Synthetic polynucleotide encoding artificial human antibody CDR-L2 region
gaggtcact

SEQ ID NO: 3675 - DNA, 9 bp, Artificial Sequence
  Synthetic polynucleotide encoding artificial human antibody CDR-L2 region
aaggcgtct

SEQ ID NO: 3676 - DNA, 9 bp, Artificial Sequence
  Synthetic polynucleotide encoding artificial human antibody CDR-L2 region
ggtgcatcc

SEQ ID NO: 3677 - DNA, 21 bp, Artificial Sequence
  Synthetic polynucleotide encoding artificial human antibody CDR-L2 region
cttaacagtgatggcagccac

SEQ ID NO: 3678 - DNA, 9 bp, Artificial Sequence
  Synthetic polynucleotide encoding artificial human antibody CDR-L2 region
ggtgcatcc

SEQ ID NO: 3679 - DNA, 9 bp, Artificial Sequence
  Synthetic polynucleotide encoding artificial human antibody CDR-L2 region
gctaacagc

SEQ ID NO: 3680 - DNA, 9 bp, Artificial Sequence
  Synthetic polynucleotide encoding artificial human antibody CDR-L2 region
ggtaacagt

SEQ ID NO: 3681 - DNA, 9 bp, Artificial Sequence
  Synthetic polynucleotide encoding artificial human antibody CDR-L2 region
ctgggttct

SEQ ID NO: 3682 - DNA, 9 bp, Artificial Sequence
  Synthetic polynucleotide encoding artificial human antibody CDR-L2 region
gctgcatcc

SEQ ID NO: 3683 - DNA, 9 bp, Artificial Sequence
  Synthetic polynucleotide encoding artificial human antibody CDR-L2 region
agtaataat

SEQ ID NO: 3684 - DNA, 9 bp, Artificial Sequence
  Synthetic polynucleotide encoding artificial human antibody CDR-L2 region
atgggttcg

SEQ ID NO: 3685 - DNA, 9 bp, Artificial Sequence
  Synthetic polynucleotide encoding artificial human antibody CDR-L2 region
ggtaaaaac

SEQ ID NO: 3686 - DNA, 9 bp, Artificial Sequence
  Synthetic polynucleotide encoding artificial human antibody CDR-L2 region
aaggcgtct

SEQ ID NO: 3687 - DNA, 9 bp, Artificial Sequence
  Synthetic polynucleotide encoding artificial human antibody CDR-L2 region
tgggcgtct

SEQ ID NO: 3688 - DNA, 9 bp, Artificial Sequence
  Synthetic polynucleotide encoding artificial human antibody CDR-L2 region
aggaataat

SEQ ID NO: 3689 - DNA, 9 bp, Artificial Sequence
  Synthetic polynucleotide encoding artificial human antibody CDR-L2 region
gctgcatcc

SEQ ID NO: 3690 - DNA, 9 bp, Artificial Sequence
  Synthetic polynucleotide encoding artificial human antibody CDR-L2 region
gacgatagc

SEQ ID NO: 3691 - DNA, 9 bp, Artificial Sequence
  Synthetic polynucleotide encoding artificial human antibody CDR-L2 region
gctaacaac

SEQ ID NO: 3692 - DNA, 9 bp, Artificial Sequence
  Synthetic polynucleotide encoding artificial human antibody CDR-L2 region
ggtgaaaac

SEQ ID NO: 3693 - DNA, 9 bp, Artificial Sequence
  Synthetic polynucleotide encoding artificial human antibody CDR-L2 region
gatgtcact

SEQ ID NO: 3694 - DNA, 9 bp, Artificial Sequence
  Synthetic polynucleotide encoding artificial human antibody CDR-L2 region
tgggcatct

SEQ ID NO: 3695 - DNA, 9 bp, Artificial Sequence
  Synthetic polynucleotide encoding artificial human antibody CDR-L2 region
gaggtcagt

SEQ ID NO: 3696 - DNA, 9 bp, Artificial Sequence
  Synthetic polynucleotide encoding artificial human antibody CDR-L2 region
gatgcatcc

SEQ ID NO: 3697 - DNA, 9 bp, Artificial Sequence
  Synthetic polynucleotide encoding artificial human antibody CDR-L2 region
gatgatagt

SEQ ID NO: 3698 - DNA, 9 bp, Artificial Sequence
  Synthetic polynucleotide encoding artificial human antibody CDR-L2 region
ggggcctcc

SEQ ID NO: 3699 - DNA, 9 bp, Artificial Sequence
  Synthetic polynucleotide encoding artificial human antibody CDR-L2 region
gaaaataat

SEQ ID NO: 3700 - DNA, 9 bp, Artificial Sequence
  Synthetic polynucleotide encoding artificial human antibody CDR-L2 region
tctgatagc

SEQ ID NO: 3701 - DNA, 9 bp, Artificial Sequence
  Synthetic polynucleotide encoding artificial human antibody CDR-L2 region
ggtccatcc

SEQ ID NO: 3702 - DNA, 9 bp, Artificial Sequence
  Synthetic polynucleotide encoding artificial human antibody CDR-L2 region
gagggcagt

SEQ ID NO: 3703 - DNA, 9 bp, Artificial Sequence
  Synthetic polynucleotide encoding artificial human antibody CDR-L2 region
atggtttct

SEQ ID NO: 3704 - DNA, 9 bp, Artificial Sequence
  Synthetic polynucleotide encoding artificial human antibody CDR-L2 region
aggaataat

SEQ ID NO: 3705 - DNA, 9 bp, Artificial Sequence
  Synthetic polynucleotide encoding artificial human antibody CDR-L2 region
ggtaaaaac

SEQ ID NO: 3706 - DNA, 9 bp, Artificial Sequence
  Synthetic polynucleotide encoding artificial human antibody CDR-L2 region
gctgcatcc

SEQ ID NO: 3707 - DNA, 9 bp, Artificial Sequence
  Synthetic polynucleotide encoding artificial human antibody CDR-L2 region
gatgatagc

SEQ ID NO: 3708 - DNA, 9 bp, Artificial Sequence
  Synthetic polynucleotide encoding artificial human antibody CDR-L2 region
gctgcatcc

SEQ ID NO: 3709 - DNA, 9 bp, Artificial Sequence
  Synthetic polynucleotide encoding artificial human antibody CDR-L2 region
gatgcctcc

SEQ ID NO: 3710 - DNA, 9 bp, Artificial Sequence
  Synthetic polynucleotide encoding artificial human antibody CDR-L2 region
ttgggttct

SEQ ID NO: 3711 - DNA, 9 bp, Artificial Sequence
  Synthetic polynucleotide encoding artificial human antibody CDR-L2 region
caagatagc

SEQ ID NO: 3712 - DNA, 9 bp, Artificial Sequence
  Synthetic polynucleotide encoding artificial human antibody CDR-L2 region
gaggacagc

SEQ ID NO: 3713 - DNA, 9 bp, Artificial Sequence
  Synthetic polynucleotide encoding artificial human antibody CDR-L2 region
ggtaaaaac

SEQ ID NO: 3714 - DNA, 9 bp, Artificial Sequence
  Synthetic polynucleotide encoding artificial human antibody CDR-L2 region
tgggcatct

SEQ ID NO: 3715 - DNA, 9 bp, Artificial Sequence
  Synthetic polynucleotide encoding artificial human antibody CDR-L2 region
ttgggttct

SEQ ID NO: 3716 - DNA, 9 bp, Artificial Sequence
  Synthetic polynucleotide encoding artificial human antibody CDR-L2 region
gacgtcagt

SEQ ID NO: 3717 - DNA, 9 bp, Artificial Sequence
  Synthetic polynucleotide encoding artificial human antibody CDR-L2 region
tgggcatct

SEQ ID NO: 3718 - DNA, 9 bp, Artificial Sequence
  Synthetic polynucleotide encoding artificial human antibody CDR-L2 region
gagggcagt

SEQ ID NO: 3719 - DNA, 9 bp, Artificial Sequence
  Synthetic polynucleotide encoding artificial human antibody CDR-L2 region
gaggacagc

SEQ ID NO: 3720 - DNA, 9 bp, Artificial Sequence
  Synthetic polynucleotide encoding artificial human antibody CDR-L2 region
ggtgcatcc

SEQ ID NO: 3721 - DNA, 9 bp, Artificial Sequence
  Synthetic polynucleotide encoding artificial human antibody CDR-L2 region
ggtgcatcc

SEQ ID NO: 3722 - DNA, 9 bp, Artificial Sequence
  Synthetic polynucleotide encoding artificial human antibody CDR-L2 region
tatgatagc

SEQ ID NO: 3723 - DNA, 9 bp, Artificial Sequence
  Synthetic polynucleotide encoding artificial human antibody CDR-L2 region
gacgtcatt

SEQ ID NO: 3724 - DNA, 9 bp, Artificial Sequence
  Synthetic polynucleotide encoding artificial human antibody CDR-L2 region
tgggcatct

SEQ ID NO: 3725 - DNA, 9 bp, Artificial Sequence
  Synthetic polynucleotide encoding artificial human antibody CDR-L2 region
gatgatagc

SEQ ID NO: 3726 - DNA, 9 bp, Artificial Sequence
  Synthetic polynucleotide encoding artificial human antibody CDR-L2 region
agtgcatcc

SEQ ID NO: 3727 - DNA, 9 bp, Artificial Sequence
  Synthetic polynucleotide encoding artificial human antibody CDR-L2 region
agtaataat

SEQ ID NO: 3728 - DNA, 9 bp, Artificial Sequence
  Synthetic polynucleotide encoding artificial human antibody CDR-L2 region
gaagatcac

SEQ ID NO: 3729 - DNA, 9 bp, Artificial Sequence
  Synthetic polynucleotide encoding artificial human antibody CDR-L2 region
ggtaacagc

SEQ ID NO: 3730 - DNA, 9 bp, Artificial Sequence
  Synthetic polynucleotide encoding artificial human antibody CDR-L2 region
gctgcatcc

SEQ ID NO: 3731 - DNA, 9 bp, Artificial Sequence
  Synthetic polynucleotide encoding artificial human antibody CDR-L2 region
gctgcatcc

SEQ ID NO: 3732 - DNA, 9 bp, Artificial Sequence
  Synthetic polynucleotide encoding artificial human antibody CDR-L2 region
ggtgcatcc

SEQ ID NO: 3733 - DNA, 9 bp, Artificial Sequence
  Synthetic polynucleotide encoding artificial human antibody CDR-L2 region
gaggtcact

SEQ ID NO: 3734 - DNA, 9 bp, Artificial Sequence
  Synthetic polynucleotide encoding artificial human antibody CDR-L2 region
ggtgcatcc

SEQ ID NO: 3735 - DNA, 9 bp, Artificial Sequence
  Synthetic polynucleotide encoding artificial human antibody CDR-L2 region
ggtgcatcc

SEQ ID NO: 3736 - DNA, 9 bp, Artificial Sequence
  Synthetic polynucleotide encoding artificial human antibody CDR-L2 region
aacacaaat

SEQ ID NO: 3737 - DNA, 9 bp, Artificial Sequence
  Synthetic polynucleotide encoding artificial human antibody CDR-L2 region
ggtaacgac

SEQ ID NO: 3738 - DNA, 9 bp, Artificial Sequence
  Synthetic polynucleotide encoding artificial human antibody CDR-L2 region
gctaacacc

SEQ ID NO: 3739 - DNA, 9 bp, Artificial Sequence
  Synthetic polynucleotide encoding artificial human antibody CDR-L2 region
gagacttcc

SEQ ID NO: 3740 - DNA, 9 bp, Artificial Sequence
  Synthetic polynucleotide encoding artificial human antibody CDR-L2 region
gatgtcagt

SEQ ID NO: 3741 - DNA, 9 bp, Artificial Sequence
  Synthetic polynucleotide encoding artificial human antibody CDR-L2 region
gagggcagt

SEQ ID NO: 3742 - DNA, 9 bp, Artificial Sequence
  Synthetic polynucleotide encoding artificial human antibody CDR-L2 region
tgggcatct

SEQ ID NO: 3743 - DNA, 9 bp, Artificial Sequence
  Synthetic polynucleotide encoding artificial human antibody CDR-L2 region
agtaataat

SEQ ID NO: 3744 - DNA, 9 bp, Artificial Sequence
  Synthetic polynucleotide encoding artificial human antibody CDR-L2 region
gatacaagc

SEQ ID NO: 3745 - DNA, 9 bp, Artificial Sequence
  Synthetic polynucleotide encoding artificial human antibody CDR-L2 region
agtaacaac

SEQ ID NO: 3746 - DNA, 9 bp, Artificial Sequence
  Synthetic polynucleotide encoding artificial human antibody CDR-L2 region
gatgcatcc

SEQ ID NO: 3747 - DNA, 9 bp, Artificial Sequence
  Synthetic polynucleotide encoding artificial human antibody CDR-L2 region
gctgcatcc

SEQ ID NO: 3748 - DNA, 9 bp, Artificial Sequence
  Synthetic polynucleotide encoding artificial human antibody CDR-L2 region
ggtgaggac

SEQ ID NO: 3749 - DNA, 9 bp, Artificial Sequence
  Synthetic polynucleotide encoding artificial human antibody CDR-L2 region
tgggcatct

SEQ ID NO: 3750 - DNA, 9 bp, Artificial Sequence
  Synthetic polynucleotide encoding artificial human antibody CDR-L2 region
aaggtttct

SEQ ID NO: 3751 - DNA, 9 bp, Artificial Sequence
  Synthetic polynucleotide encoding artificial human antibody CDR-L2 region
gaagacagt

SEQ ID NO: 3752 - DNA, 9 bp, Artificial Sequence
  Synthetic polynucleotide encoding artificial human antibody CDR-L2 region
gatgatagc

SEQ ID NO: 3753 - DNA, 9 bp, Artificial Sequence
  Synthetic polynucleotide encoding artificial human antibody CDR-L2 region
gctgcttcc

SEQ ID NO: 3754 - DNA, 9 bp, Artificial Sequence
  Synthetic polynucleotide encoding artificial human antibody CDR-L2 region
gatgcttcc

SEQ ID NO: 3755 - DNA, 9 bp, Artificial Sequence
  Synthetic polynucleotide encoding artificial human antibody CDR-L2 region
tgggcatct

SEQ ID NO: 3756 - DNA, 9 bp, Artificial Sequence
  Synthetic polynucleotide encoding artificial human antibody CDR-L2 region
aaagacacg

SEQ ID NO: 3757 - DNA, 9 bp, Artificial Sequence
  Synthetic polynucleotide encoding artificial human antibody CDR-L2 region
cgggcatct

SEQ ID NO: 3758 - DNA, 9 bp, Artificial Sequence
  Synthetic polynucleotide encoding artificial human antibody CDR-L2 region
tgggcatct

SEQ ID NO: 3759 - DNA, 9 bp, Artificial Sequence
  Synthetic polynucleotide encoding artificial human antibody CDR-L2 region
caggatacc

SEQ ID NO: 3760 - DNA, 9 bp, Artificial Sequence
  Synthetic polynucleotide encoding artificial human antibody CDR-L2 region
tctaatact

SEQ ID NO: 3761 - DNA, 9 bp, Artificial Sequence
  Synthetic polynucleotide encoding artificial human antibody CDR-L2 region
gacactgat

SEQ ID NO: 3762 - DNA, 9 bp, Artificial Sequence
  Synthetic polynucleotide encoding artificial human antibody CDR-L2 region
aaggcgtct

SEQ ID NO: 3763 - DNA, 9 bp, Artificial Sequence
  Synthetic polynucleotide encoding artificial human antibody CDR-L2 region
tgggcatct

SEQ ID NO: 3764 - DNA, 9 bp, Artificial Sequence
  Synthetic polynucleotide encoding artificial human antibody CDR-L2 region
tgggcatct

SEQ ID NO: 3765 - DNA, 9 bp, Artificial Sequence
  Synthetic polynucleotide encoding artificial human antibody CDR-L2 region
gaggtcaat

SEQ ID NO: 3766 - DNA, 9 bp, Artificial Sequence
  Synthetic polynucleotide encoding artificial human antibody CDR-L2 region
aaggtttct

SEQ ID NO: 3767 - DNA, 9 bp, Artificial Sequence
  Synthetic polynucleotide encoding artificial human antibody CDR-L2 region
caagatagc

SEQ ID NO: 3768 - DNA, 9 bp, Artificial Sequence
  Synthetic polynucleotide encoding artificial human antibody CDR-L2 region
ggtgcatcc

SEQ ID NO: 3769 - DNA, 9 bp, Artificial Sequence
  Synthetic polynucleotide encoding artificial human antibody CDR-L2 region
aaagataac

SEQ ID NO: 3770 - DNA, 9 bp, Artificial Sequence
  Synthetic polynucleotide encoding artificial human antibody CDR-L2 region
ttgggttct

SEQ ID NO: 3771 - DNA, 9 bp, Artificial Sequence
  Synthetic polynucleotide encoding artificial human antibody CDR-L2 region
gacaataat

SEQ ID NO: 3772 - DNA, 9 bp, Artificial Sequence
  Synthetic polynucleotide encoding artificial human antibody CDR-L2 region
aaggcgtct

SEQ ID NO: 3773 - DNA, 9 bp, Artificial Sequence
  Synthetic polynucleotide encoding artificial human antibody CDR-L2 region
aaggcgtct

SEQ ID NO: 3774 - DNA, 9 bp, Artificial Sequence
  Synthetic polynucleotide encoding artificial human antibody CDR-L2 region
ggtaacagc

SEQ ID NO: 3775 - DNA, 9 bp, Artificial Sequence
  Synthetic polynucleotide encoding artificial human antibody CDR-L2 region
aaagacagt

SEQ ID NO: 3776 - DNA, 9 bp, Artificial Sequence
  Synthetic polynucleotide encoding artificial human antibody CDR-L2 region
tctgcttcc

SEQ ID NO: 3777 - DNA, 9 bp, Artificial Sequence
  Synthetic polynucleotide encoding artificial human antibody CDR-L2 region
ggtgcatcc

SEQ ID NO: 3778 - DNA, 9 bp, Artificial Sequence
  Synthetic polynucleotide encoding artificial human antibody CDR-L2 region
gctgcatcc

SEQ ID NO: 3779 - DNA, 9 bp, Artificial Sequence
  Synthetic polynucleotide encoding artificial human antibody CDR-L2 region
gctgcatcc

SEQ ID NO: 3780 - DNA, 9 bp, Artificial Sequence
  Synthetic polynucleotide encoding artificial human antibody CDR-L2 region
ggtgcatcc

SEQ ID NO: 3781 - DNA, 9 bp, Artificial Sequence
  Synthetic polynucleotide encoding artificial human antibody CDR-L2 region
tatgataga

SEQ ID NO: 3782 - DNA, 9 bp, Artificial Sequence
  Synthetic polynucleotide encoding artificial human antibody CDR-L2 region
gaggataaa

SEQ ID NO: 3783 - DNA, 9 bp, Artificial Sequence
  Synthetic polynucleotide encoding artificial human antibody CDR-L2 region
ttgggttct

SEQ ID NO: 3784 - DNA, 9 bp, Artificial Sequence
  Synthetic polynucleotide encoding artificial human antibody CDR-L2 region
aaggcgtct

SEQ ID NO: 3785 - DNA, 9 bp, Artificial Sequence
  Synthetic polynucleotide encoding artificial human antibody CDR-L2 region
tcgggatct

SEQ ID NO: 3786 - DNA, 9 bp, Artificial Sequence
  Synthetic polynucleotide encoding artificial human antibody CDR-L2 region
gctgcatcc

SEQ ID NO: 3787 - DNA, 9 bp, Artificial Sequence
  Synthetic polynucleotide encoding artificial human antibody CDR-L2 region
tgggcatct

SEQ ID NO: 3788 - DNA, 9 bp, Artificial Sequence
  Synthetic polynucleotide encoding artificial human antibody CDR-L2 region
aggaataat

SEQ ID NO: 3789 - DNA, 9 bp, Artificial Sequence
  Synthetic polynucleotide encoding artificial human antibody CDR-L2 region
gaggtcagt

SEQ ID NO: 3790 - DNA, 9 bp, Artificial Sequence
  Synthetic polynucleotide encoding artificial human antibody CDR-L2 region
ggtaacggc

SEQ ID NO: 3791 - DNA, 21 bp, Artificial Sequence
  Synthetic polynucleotide encoding artificial human antibody CDR-L2 region
cagtactcagactcagataag

SEQ ID NO: 3792 - DNA, 9 bp, Artificial Sequence
  Synthetic polynucleotide encoding artificial human antibody CDR-L2 region
ttgggttct

SEQ ID NO: 3793 - DNA, 9 bp, Artificial Sequence
  Synthetic polynucleotide encoding artificial human antibody CDR-L2 region
gctgcatcc

SEQ ID NO: 3794 - DNA, 9 bp, Artificial Sequence
  Synthetic polynucleotide encoding artificial human antibody CDR-L2 region
gaagtttcc

SEQ ID NO: 3795 - DNA, 42 bp, Artificial Sequence
  Synthetic polynucleotide encoding artificial human antibody CDR-H3 region
gcgagggttacccttgggagttacttttacggcatggacgtc

SEQ ID NO: 3796 - DNA, 45 bp, Artificial Sequence
  Synthetic polynucleotide encoding artificial human antibody CDR-H3 region
gcgagagatgggggatcagggagttacttcgactgctttgactac

SEQ ID NO: 3797 - DNA, 54 bp, Artificial Sequence
  Synthetic polynucleotide encoding artificial human antibody CDR-H3 region
gcaaaagatataaacttttttgggttagggacagggggaggtgctatggacgtc

SEQ ID NO: 3798 - DNA, 33 bp, Artificial Sequence
  Synthetic polynucleotide encoding artificial human antibody CDR-H3 region
gcacacagagcaatagtaggactctttgactac

SEQ ID NO: 3799 - DNA, 42 bp, Artificial Sequence
  Synthetic polynucleotide encoding artificial human antibody CDR-H3 region
gcgcgaggaggggatgggggaccccaagatgcttttgatatc

SEQ ID NO: 3800 - DNA, 51 bp, Artificial Sequence
  Synthetic polynucleotide encoding artificial human antibody CDR-H3 region
gtgaagtcattttcggctgaatattactactattactacggtatggacgtc

SEQ ID NO: 3801 - DNA, 45 bp, Artificial Sequence
  Synthetic polynucleotide encoding artificial human antibody CDR-H3 region
gcgagagttgttccaggtgactccgtctatggtgcttttgatatc

SEQ ID NO: 3802 - DNA, 39 bp, Artificial Sequence
  Synthetic polynucleotide encoding artificial human antibody CDR-H3 region
gcaaagcggaccccgttcggggagtgggcatttgactac

SEQ ID NO: 3803 - DNA, 51 bp, Artificial Sequence
  Synthetic polynucleotide encoding artificial human antibody CDR-H3 region
gcgaaagatccggggacctttagggaccatctttggagtggtgttgactac

SEQ ID NO: 3804 - DNA, 48 bp, Artificial Sequence
  Synthetic polynucleotide encoding artificial human antibody CDR-H3 region
gcaaaagcggcggctacactcccctacttccgcttcgctatggacgtc

SEQ ID NO: 3805 - DNA, 51 bp, Artificial Sequence
  Synthetic polynucleotide encoding artificial human antibody CDR-H3 region
gcgagagtgggagtctttaagggcctggctcctttcggggggttcgacccc

SEQ ID NO: 3806 - DNA, 33 bp, Artificial Sequence
  Synthetic polynucleotide encoding artificial human antibody CDR-H3 region
gcgagagacagtggtggcactccggggccctac

SEQ ID NO: 3807 - DNA, 48 bp, Artificial Sequence
  Synthetic polynucleotide encoding artificial human antibody CDR-H3 region
gtgaggtcgttcgtcggcgcagttcccgcttatcccaactttgacttc

SEQ ID NO: 3808 - DNA, 33 bp, Artificial Sequence
  Synthetic polynucleotide encoding artificial human antibody CDR-H3 region
gtaagaggggtagtgggggctactctcgacaac

SEQ ID NO: 3809 - DNA, 51 bp, Artificial Sequence
  Synthetic polynucleotide encoding artificial human antibody CDR-H3 region
gtgaaagattcccgggttacggggcaaagcagtggttatatctttgactct

SEQ ID NO: 3810 - DNA, 33 bp, Artificial Sequence
  Synthetic polynucleotide encoding artificial human antibody CDR-H3 region
gcgagaccccgtttaggctggtacttcgatctc

SEQ ID NO: 3811 - DNA, 39 bp, Artificial Sequence
  Synthetic polynucleotide encoding artificial human antibody CDR-H3 region
gcgagagaaaccgccgggcagctcatcccctttgactac

SEQ ID NO: 3812 - DNA, 51 bp, Artificial Sequence
  Synthetic polynucleotide encoding artificial human antibody CDR-H3 region
gcgagagattatatgggtgtggatttctactactactacggtatggacgtc

SEQ ID NO: 3813 - DNA, 42 bp, Artificial Sequence
  Synthetic polynucleotide encoding artificial human antibody CDR-H3 region
gcgagagatatagcagtggctattactaactactttggctcc

SEQ ID NO: 3814 - DNA, 33 bp, Artificial Sequence
  Synthetic polynucleotide encoding artificial human antibody CDR-H3 region
gcgagagaacatcgtagtgggtatcagcgatac

SEQ ID NO: 3815 - DNA, 33 bp, Artificial Sequence
  Synthetic polynucleotide encoding artificial human antibody CDR-H3 region
gcacacttctctacggtgattaactttggccac

SEQ ID NO: 3816 - DNA, 33 bp, Artificial Sequence
  Synthetic polynucleotide encoding artificial human antibody CDR-H3 region
gcgtgccgacggatatatcaggggttcgacccc

SEQ ID NO: 3817 - DNA, 30 bp, Artificial Sequence
  Synthetic polynucleotide encoding artificial human antibody CDR-H3 region
gcgagagatcgagctacctcgtttgattac

SEQ ID NO: 3818 - DNA, 27 bp, Artificial Sequence
  Synthetic polynucleotide encoding artificial human antibody CDR-H3 region
gcgagaggtcggggggaaatggacgtc

SEQ ID NO: 3819 - DNA, 42 bp, Artificial Sequence
  Synthetic polynucleotide encoding artificial human antibody CDR-H3 region
gcgactacccctagcagcagctggtactggtacttcgacccc

SEQ ID NO: 3820 - DNA, 48 bp, Artificial Sequence
  Synthetic polynucleotide encoding artificial human antibody CDR-H3 region
gcgagagatcttgaacttattattgcagcaggtgctccccttgaccac

SEQ ID NO: 3821 - DNA, 48 bp, Artificial Sequence
  Synthetic polynucleotide encoding artificial human antibody CDR-H3 region
gcgagactggtaacatcacctgaagaagggggtccctggttcgacccc

SEQ ID NO: 3822 - DNA, 36 bp, Artificial Sequence
  Synthetic polynucleotide encoding artificial human antibody CDR-H3 region
gcgagagatacggaagtggggcatcactttgactac

SEQ ID NO: 3823 - DNA, 33 bp, Artificial Sequence
  Synthetic polynucleotide encoding artificial human antibody CDR-H3 region
gcgaagccctggagaagtgatggttttgatgtc

SEQ ID NO: 3824 - DNA, 33 bp, Artificial Sequence
  Synthetic polynucleotide encoding artificial human antibody CDR-H3 region
gcagtgggcatggttacagatggttttgaaatc

SEQ ID NO: 3825 - DNA, 36 bp, Artificial Sequence
  Synthetic polynucleotide encoding artificial human antibody CDR-H3 region
gccaggctggatttgcggaccgtgaggttcgacccc

SEQ ID NO: 3826 - DNA, 42 bp, Artificial Sequence
  Synthetic polynucleotide encoding artificial human antibody CDR-H3 region
gcgagacatagcagtggccccccccggctcgcttttgatatc

SEQ ID NO: 3827 - DNA, 39 bp, Artificial Sequence
  Synthetic polynucleotide encoding artificial human antibody CDR-H3 region
gcgaaagatttcgctatgcctacagtaactacggactac

SEQ ID NO: 3828 - DNA, 39 bp, Artificial Sequence
  Synthetic polynucleotide encoding artificial human antibody CDR-H3 region
gtacacagaccatccctggcctattggtacttcgatgtc

SEQ ID NO: 3829 - DNA, 42 bp, Artificial Sequence
  Synthetic polynucleotide encoding artificial human antibody CDR-H3 region
gtgagagagggtgattcacggaaatattatagtcttgactat

SEQ ID NO: 3830 - DNA, 39 bp, Artificial Sequence
  Synthetic polynucleotide encoding artificial human antibody CDR-H3 region
gcgagagatccaatgtgggtctcttatgcttttgatatc

SEQ ID NO: 3831 - DNA, 27 bp, Artificial Sequence
  Synthetic polynucleotide encoding artificial human antibody CDR-H3 region
gcgagtggttatgtttctttcgatctc

SEQ ID NO: 3832 - DNA, 48 bp, Artificial Sequence
  Synthetic polynucleotide encoding artificial human antibody CDR-H3 region
gcgagagagggggcctatgagagtagtggacctgatccttttgatatc

SEQ ID NO: 3833 - DNA, 45 bp, Artificial Sequence
  Synthetic polynucleotide encoding artificial human antibody CDR-H3 region
gcgagcctctttctaacatactatggttcggggacttattatcgc

SEQ ID NO: 3834 - DNA, 33 bp, Artificial Sequence
  Synthetic polynucleotide encoding artificial human antibody CDR-H3 region
gcgaaatcgaccctcggtggtggttttgacttc

SEQ ID NO: 3835 - DNA, 54 bp, Artificial Sequence
  Synthetic polynucleotide encoding artificial human antibody CDR-H3 region
gcgagagttggtagcagcagctggtacagctccgggcgatccccttttgactac

SEQ ID NO: 3836 - DNA, 48 bp, Artificial Sequence
  Synthetic polynucleotide encoding artificial human antibody CDR-H3 region
gcgaaagatcaaatcgtcctagagatggctacaagcccctttgactac

SEQ ID NO: 3837 - DNA, 51 bp, Artificial Sequence
  Synthetic polynucleotide encoding artificial human antibody CDR-H3 region
gcgagagatctcagttgtagtagtaccagctgccatgatgcttttgatatc

SEQ ID NO: 3838 - DNA, 48 bp, Artificial Sequence
  Synthetic polynucleotide encoding artificial human antibody CDR-H3 region
gcgagaggacccaatttccatgagagtatacgtgatggctttgatatc

SEQ ID NO: 3839 - DNA, 36 bp, Artificial Sequence
  Synthetic polynucleotide encoding artificial human antibody CDR-H3 region
gcaagagttaactggaattccgatacctttgactcc

SEQ ID NO: 3840 - DNA, 60 bp, Artificial Sequence
  Synthetic polynucleotide encoding artificial human antibody CDR-H3 region
gcgagagatccggggagagatccgtatttggacttggactatcactacggcatggacgtc

SEQ ID NO: 3841 - DNA, 48 bp, Artificial Sequence
  Synthetic polynucleotide encoding artificial human antibody CDR-H3 region
gcgagagataagaggagcggtatgacttccgacagacgaattgactac

SEQ ID NO: 3842 - DNA, 36 bp, Artificial Sequence
  Synthetic polynucleotide encoding artificial human antibody CDR-H3 region
tcggggggctattactcctcctcccacatggacgtc

SEQ ID NO: 3843 - DNA, 39 bp, Artificial Sequence
  Synthetic polynucleotide encoding artificial human antibody CDR-H3 region
gcgagagtgaatatagcagcagctggtactcttgactac

SEQ ID NO: 3844 - DNA, 63 bp, Artificial Sequence
  Synthetic polynucleotide encoding artificial human antibody CDR-H3 region
gtaaaagatatggggcctgctggaactgcttcggcttatcactaccacaatggaatggacgtc

SEQ ID NO: 3845 - DNA, 36 bp, Artificial Sequence
  Synthetic polynucleotide encoding artificial human antibody CDR-H3 region
gcgagactaactactagtaccagcgcgctgagctac

SEQ ID NO: 3846 - DNA, 48 bp, Artificial Sequence
  Synthetic polynucleotide encoding artificial human antibody CDR-H3 region
gcgagagagaactggaactccgctggaactacggagtggttcgacccc

SEQ ID NO: 3847 - DNA, 30 bp, Artificial Sequence
  Synthetic polynucleotide encoding artificial human antibody CDR-H3 region
gcgagagatactctacaaaagggggactac

SEQ ID NO: 3848 - DNA, 57 bp, Artificial Sequence
  Synthetic polynucleotide encoding artificial human antibody CDR-H3 region
gcgagagcctcccgcgttctagaaagtaagagctggcacggggatgcttttgatgtc

SEQ ID NO: 3849 - DNA, 39 bp, Artificial Sequence
  Synthetic polynucleotide encoding artificial human antibody CDR-H3 region
gcgaggggtcttggcggtagtggttattattttgactac

SEQ ID NO: 3850 - DNA, 51 bp, Artificial Sequence
  Synthetic polynucleotide encoding artificial human antibody CDR-H3 region
gcgagacaggcattttgtggtgctaattgctggtcgggcgcttatgatatc

SEQ ID NO: 3851 - DNA, 57 bp, Artificial Sequence
  Synthetic polynucleotide encoding artificial human antibody CDR-H3 region
gtgagaaggggggcgactgtatttcagggaaagataattaaaggctacatggacgtc

SEQ ID NO: 3852 - DNA, 30 bp, Artificial Sequence
  Synthetic polynucleotide encoding artificial human antibody CDR-H3 region
gcgaaagtgaagggggggtccaatgactac

SEQ ID NO: 3853 - DNA, 39 bp, Artificial Sequence
  Synthetic polynucleotide encoding artificial human antibody CDR-H3 region
gcgagacacctctacggtgacttttactacttagactac

SEQ ID NO: 3854 - DNA, 39 bp, Artificial Sequence
  Synthetic polynucleotide encoding artificial human antibody CDR-H3 region
gcgagagaccatcgtacggggagttattatcccgactac

SEQ ID NO: 3855 - DNA, 45 bp, Artificial Sequence
  Synthetic polynucleotide encoding artificial human antibody CDR-H3 region
gcgagaggggtgaggcagcagcaggttcggaagtggttcgacccc

SEQ ID NO: 3856 - DNA, 36 bp, Artificial Sequence
  Synthetic polynucleotide encoding artificial human antibody CDR-H3 region
gcgatggataattcggggagcgggggcgttgactac

SEQ ID NO: 3857 - DNA, 36 bp, Artificial Sequence
  Synthetic polynucleotide encoding artificial human antibody CDR-H3 region
gcgagagatagttatcactactacggtatggacgtc

SEQ ID NO: 3858 - DNA, 48 bp, Artificial Sequence
  Synthetic polynucleotide encoding artificial human antibody CDR-H3 region
gcaagagagaccgtttacatctctacttactactacggtttggacgtc

SEQ ID NO: 3859 - DNA, 39 bp, Artificial Sequence
  Synthetic polynucleotide encoding artificial human antibody CDR-H3 region
gcaacagatgggcccttacatacgtcgggacttgactac

SEQ ID NO: 3860 - DNA, 39 bp, Artificial Sequence
  Synthetic polynucleotide encoding artificial human antibody CDR-H3 region
gcgtgcttgggggctgaggcgaacgatgcttttgatatc

SEQ ID NO: 3861 - DNA, 21 bp, Artificial Sequence
  Synthetic polynucleotide encoding artificial human antibody CDR-H3 region
gcgaaagtccctggggactac

SEQ ID NO: 3862 - DNA, 45 bp, Artificial Sequence
  Synthetic polynucleotide encoding artificial human antibody CDR-H3 region
gcgagagcgggccttagtaccagttggccgagctggttcgacccc

SEQ ID NO: 3863 - DNA, 42 bp, Artificial Sequence
  Synthetic polynucleotide encoding artificial human antibody CDR-H3 region
gcgagaaacgatatttccttcaaacagagtgctatcgacgtc

SEQ ID NO: 3864 - DNA, 51 bp, Artificial Sequence
  Synthetic polynucleotide encoding artificial human antibody CDR-H3 region
gcgaaaacgaagactatgggtgtggggggagagtatttcggcttggacgtc

SEQ ID NO: 3865 - DNA, 48 bp, Artificial Sequence
  Synthetic polynucleotide encoding artificial human antibody CDR-H3 region
gcgagacacaaggccctctggttcggggaggcaggggcttttgatatc

SEQ ID NO: 3866 - DNA, 54 bp, Artificial Sequence
  Synthetic polynucleotide encoding artificial human antibody CDR-H3 region
gcaaaagatttgttagggttcagggaccaaaggaactactacggtatggacgtc

SEQ ID NO: 3867 - DNA, 39 bp, Artificial Sequence
  Synthetic polynucleotide encoding artificial human antibody CDR-H3 region
gcgagaagcttctacgacacccttttctactttgagaac

SEQ ID NO: 3868 - DNA, 36 bp, Artificial Sequence
  Synthetic polynucleotide encoding artificial human antibody CDR-H3 region
gcacgcgtttatagtaccaagtgggactttgactac

SEQ ID NO: 3869 - DNA, 33 bp, Artificial Sequence
  Synthetic polynucleotide encoding artificial human antibody CDR-H3 region
gcgaaagggggccctttacgtccttttgatatc

SEQ ID NO: 3870 - DNA, 45 bp, Artificial Sequence
  Synthetic polynucleotide encoding artificial human antibody CDR-H3 region
gcgagacttagtagagacggctacaccattgagcactttgactac

SEQ ID NO: 3871 - DNA, 57 bp, Artificial Sequence
  Synthetic polynucleotide encoding artificial human antibody CDR-H3 region
gcgagacgcggggttagtggtgggagcgcctggacgtattacaactttttcgacccc

SEQ ID NO: 3872 - DNA, 42 bp, Artificial Sequence
  Synthetic polynucleotide encoding artificial human antibody CDR-H3 region
gcgagagaacttcccgtgattggtagacgtacttttgatatc

SEQ ID NO: 3873 - DNA, 66 bp, Artificial Sequence
  Synthetic polynucleotide encoding artificial human antibody CDR-H3 region
gcgagagattccgaggtggaaaagagtgatgggtacatggcctcgaccgctgaatacttccaactc

SEQ ID NO: 3874 - DNA, 45 bp, Artificial Sequence
  Synthetic polynucleotide encoding artificial human antibody CDR-H3 region
gtaaaagcaggtgtcccgtgggaggtccagcgatggttcgacccc

SEQ ID NO: 3875 - DNA, 36 bp, Artificial Sequence
  Synthetic polynucleotide encoding artificial human antibody CDR-H3 region
gcgagagatcgtcagggcctaggccgtatggacgtc

SEQ ID NO: 3876 - DNA, 36 bp, Artificial Sequence
  Synthetic polynucleotide encoding artificial human antibody CDR-H3 region
gcgagggaactgggtgcgaactactactttgcctat

SEQ ID NO: 3877 - DNA, 45 bp, Artificial Sequence
  Synthetic polynucleotide encoding artificial human antibody CDR-H3 region
gcgagggaagtcgatatacgtggagacagcgatgcttttgatatt

SEQ ID NO: 3878 - DNA, 30 bp, Artificial Sequence
  Synthetic polynucleotide encoding artificial human antibody CDR-H3 region
gcgactacccgaaactcagctttcctcaac

SEQ ID NO: 3879 - DNA, 42 bp, Artificial Sequence
  Synthetic polynucleotide encoding artificial human antibody CDR-H3 region
gcgaagtccgcatttgggggagttcctgatggttttgatatc

SEQ ID NO: 3880 - DNA, 21 bp, Artificial Sequence
  Synthetic polynucleotide encoding artificial human antibody CDR-H3 region
gcgagagatgggtttgactac

SEQ ID NO: 3881 - DNA, 39 bp, Artificial Sequence
  Synthetic polynucleotide encoding artificial human antibody CDR-H3 region
gcaaaagcgggatacagctttactaccgctcctgactac

SEQ ID NO: 3882 - DNA, 42 bp, Artificial Sequence
  Synthetic polynucleotide encoding artificial human antibody CDR-H3 region
gcgcgagagagaggccaggtccgttcctacggcatggacgtc

SEQ ID NO: 3883 - DNA, 57 bp, Artificial Sequence
  Synthetic polynucleotide encoding artificial human antibody CDR-H3 region
gtaaaaattggcggggatgggacagcctacgcttggacctttaggcactttgactcc

SEQ ID NO: 3884 - DNA, 39 bp, Artificial Sequence
  Synthetic polynucleotide encoding artificial human antibody CDR-H3 region
gcgagagggttgggtggagattggaactaccttgcctac

SEQ ID NO: 3885 - DNA, 63 bp, Artificial Sequence
  Synthetic polynucleotide encoding artificial human antibody CDR-H3 region
gcgaaagaaggtggatgggggaatacagtaactacgtcctactactactacggtatggatgtc

SEQ ID NO: 3886 - DNA, 42 bp, Artificial Sequence
  Synthetic polynucleotide encoding artificial human antibody CDR-H3 region
acgagggatgggggatacttcgcaactggcgagtttgactac

SEQ ID NO: 3887 - DNA, 36 bp, Artificial Sequence
  Synthetic polynucleotide encoding artificial human antibody CDR-H3 region
gcgagagagcgctttggccaaggtgcccttgactac

SEQ ID NO: 3888 - DNA, 45 bp, Artificial Sequence
  Synthetic polynucleotide encoding artificial human antibody CDR-H3 region
gcgaccatcgtcgctgcctacagctatggtttcgagttcgacccc

SEQ ID NO: 3889 - DNA, 63 bp, Artificial Sequence; identical to SEQ ID NO: 3885
  Synthetic polynucleotide encoding artificial human antibody CDR-H3 region

SEQ ID NO: 3890 - DNA, 45 bp, Artificial Sequence
  Synthetic polynucleotide encoding artificial human antibody CDR-H3 region
gcgcgacagggatttgaggctctggttattcgaggctttgactac

SEQ ID NO: 3891 - DNA, 45 bp, Artificial Sequence
  Synthetic polynucleotide encoding artificial human antibody CDR-H3 region
gcgaggagatctaccagtagcccctctttcagcactctggacgtc

SEQ ID NO: 3892 - DNA, 30 bp, Artificial Sequence
  Synthetic polynucleotide encoding artificial human antibody CDR-H3 region
gcgagacaaatggtgactacgaggggctac

SEQ ID NO: 3893 - DNA, 48 bp, Artificial Sequence
  Synthetic polynucleotide encoding artificial human antibody CDR-H3 region
gcgagagtcccatctcgctatggccgttccaggggcgcttttgatatc

SEQ ID NO: 3894 - DNA, 36 bp, Artificial Sequence
  Synthetic polynucleotide encoding artificial human antibody CDR-H3 region
gcgagaaatctttatcgtctgggctggttcgacccc

SEQ ID NO: 3895 - DNA, 39 bp, Artificial Sequence
  Synthetic polynucleotide encoding artificial human antibody CDR-H3 region
gcgaaatcgaaaggtaactaccgggacgctatggacgtc

SEQ ID NO: 3896 - DNA, 42 bp, Artificial Sequence
  Synthetic polynucleotide encoding artificial human antibody CDR-H3 region
gcgacctcatatacagtaacgactttctacggtatggacgtc

SEQ ID NO: 3897 - DNA, 36 bp, Artificial Sequence
  Synthetic polynucleotide encoding artificial human antibody CDR-H3 region
gccagaggggcggccttctactacggtatggacgtc

SEQ ID NO: 3898 - DNA, 45 bp, Artificial Sequence
  Synthetic polynucleotide encoding artificial human antibody CDR-H3 region
gcgagagatacctacggtgacccgaggggtgactactttgactac

SEQ ID NO: 3899 - DNA, 51 bp, Artificial Sequence
  Synthetic polynucleotide encoding artificial human antibody CDR-H3 region
gcgagactgtggggtagcggtgactggtggccctccctgtattttgactcc

SEQ ID NO: 3900 - DNA, 39 bp, Artificial Sequence
  Synthetic polynucleotide encoding artificial human antibody CDR-H3 region
gcgagaatccggcgtatagcagcaactagttttgactac

SEQ ID NO: 3901 - DNA, 48 bp, Artificial Sequence
  Synthetic polynucleotide encoding artificial human antibody CDR-H3 region
gcaaaaatagcacgtcgtcctcccagtttttacgactacatggacgtc

SEQ ID NO: 3902 - DNA, 48 bp, Artificial Sequence
  Synthetic polynucleotide encoding artificial human antibody CDR-H3 region
gcgaggtcgacaagtagttccacctccgacttccactacatggacgta

SEQ ID NO: 3903 - DNA, 30 bp, Artificial Sequence
  Synthetic polynucleotide encoding artificial human antibody CDR-H3 region
acaagaggatgggcattcaccagctccgac

SEQ ID NO: 3904 - DNA, 24 bp, Artificial Sequence
  Synthetic polynucleotide encoding artificial human antibody CDR-H3 region
gcaggaggatgggcccttggctac

SEQ ID NO: 3905 - DNA, 30 bp, Artificial Sequence
  Synthetic polynucleotide encoding artificial human antibody CDR-H3 region
gcgagacaccgaattttcggtttggacgtc

SEQ ID NO: 3906 - DNA, 57 bp, Artificial Sequence
  Synthetic polynucleotide encoding artificial human antibody CDR-H3 region
gcgagacgcggaccgaccgatacatggtcaggggaagttggctactactttgactac

SEQ ID NO: 3907 - DNA, 48 bp, Artificial Sequence
  Synthetic polynucleotide encoding artificial human antibody CDR-H3 region
gcgagagatggaaaaacattagggtacggtggtaactccgttgactac

SEQ ID NO: 3908 - DNA, 45 bp, Artificial Sequence
  Synthetic polynucleotide encoding artificial human antibody CDR-H3 region
gctcggacagaaactaaatgggaggacagggggctttgggactac

SEQ ID NO: 3909 - DNA, 30 bp, Artificial Sequence
  Synthetic polynucleotide encoding artificial human antibody CDR-H3 region
gcgagatcgttttatggttcaggtttgcag

SEQ ID NO: 3910 - DNA, 39 bp, Artificial Sequence
  Synthetic polynucleotide encoding artificial human antibody CDR-H3 region
gcgagggccatgggtggctacacttactaccttgacgac

SEQ ID NO: 3911 - DNA, 51 bp, Artificial Sequence
  Synthetic polynucleotide encoding artificial human antibody CDR-H3 region
gcgagggcggggaaagacggctacaattttttctactacggtatggacgtc

SEQ ID NO: 3912 - DNA, 45 bp, Artificial Sequence
  Synthetic polynucleotide encoding artificial human antibody CDR-H3 region
gcgagagggatcatgactacagcaatttcctactactttgactac

SEQ ID NO: 3913 - DNA, 54 bp, Artificial Sequence
  Synthetic polynucleotide encoding artificial human antibody CDR-H3 region
gcgaaaggagaaagggacctgacagactacggtgaccccgaatatttccagcac

SEQ ID NO: 3914 - DNA, 54 bp, Artificial Sequence
  Synthetic polynucleotide encoding artificial human antibody CDR-H3 region
gcgaaagatctgcgatattgtagcgctcgtagtagttgttttggcattgacttc

SEQ ID NO: 3915 - DNA, 27 bp, Artificial Sequence
  Synthetic polynucleotide encoding artificial human antibody CDR-H3 region
gcgagaagagcatacagctttgactac

SEQ ID NO: 3916 - DNA, 54 bp, Artificial Sequence
  Synthetic polynucleotide encoding artificial human antibody CDR-H3 region
gcaagagagggggccccagatgactacggtgactccgggactgcttttgatatt

SEQ ID NO: 3917 - DNA, 36 bp, Artificial Sequence
  Synthetic polynucleotide encoding artificial human antibody CDR-H3 region
accaccgatcacccctatggtgactactctgacaac

SEQ ID NO: 3918 - DNA, 30 bp, Artificial Sequence
  Synthetic polynucleotide encoding artificial human antibody CDR-H3 region
gcgaaggaattattagggggttttgactat

SEQ ID NO: 3919 - DNA, 39 bp, Artificial Sequence
  Synthetic polynucleotide encoding artificial human antibody CDR-H3 region
gcgagagtttttggatcagcagctggtgcttttgatatc

SEQ ID NO: 3920 - DNA, 36 bp, Artificial Sequence
  Synthetic polynucleotide encoding artificial human antibody CDR-H3 region
gcgagacacgattggcgcttatacgcatttgactac

SEQ ID NO: 3921 - DNA, 27 bp, Artificial Sequence
  Synthetic polynucleotide encoding artificial human antibody CDR-H3 region
gcaggaggggaaaccagtcctgactac

SEQ ID NO: 3922 - DNA, 45 bp, Artificial Sequence
  Synthetic polynucleotide encoding artificial human antibody CDR-H3 region
gtgagtagggggcccctagggggagcagcagctggaccggactac

SEQ ID NO: 3923 - DNA, 30 bp, Artificial Sequence
  Synthetic polynucleotide encoding artificial human antibody CDR-H3 region
gcgcgagatgtccgagggtggttcgtcccc

SEQ ID NO: 3924 - DNA, 57 bp, Artificial Sequence
  Synthetic polynucleotide encoding artificial human antibody CDR-H3 region
gtgagagatcgcaacattgtatctgtgccaggtgctatcccctacggaatggacgtc

SEQ ID NO: 3925 - DNA, 27 bp, Artificial Sequence
  Synthetic polynucleotide encoding artificial human antibody CDR-H3 region
gcaagagggagtgacacccttgactac

SEQ ID NO: 3926 - DNA, 36 bp, Artificial Sequence
  Synthetic polynucleotide encoding artificial human antibody CDR-H3 region
gccagagtggggctaacttttgccttgttcgacccc

SEQ ID NO: 3927 - DNA, 51 bp, Artificial Sequence
  Synthetic polynucleotide encoding artificial human antibody CDR-H3 region
gcgaacagtgcggggatacagctatggtcctcagacaactggttcgacccc

SEQ ID NO: 3928 - DNA, 30 bp, Artificial Sequence
  Synthetic polynucleotide encoding artificial human antibody CDR-H3 region
gcgaaagagggcatagaactcatgatcctc

SEQ ID NO: 3929 - DNA, 42 bp, Artificial Sequence
  Synthetic polynucleotide encoding artificial human antibody CDR-H3 region
gcgagaggcattaccctgactcggggagtctcctttgactac

SEQ ID NO: 3930 - DNA, 27 bp, Artificial Sequence
  Synthetic polynucleotide encoding artificial human antibody CDR-H3 region
gccagagatgggggagcttttgatatc

SEQ ID NO: 3931 - DNA, 48 bp, Artificial Sequence
  Synthetic polynucleotide encoding artificial human antibody CDR-H3 region
gcgagagatcggcttttcacagctattaacagtgggtactttgactac

SEQ ID NO: 3932 - DNA, 33 bp, Artificial Sequence
  Synthetic polynucleotide encoding artificial human antibody CDR-H3 region
gcgagagaggggagctactacgggattggctac

SEQ ID NO: 3933 - DNA, 42 bp, Artificial Sequence
  Synthetic polynucleotide encoding artificial human antibody CDR-H3 region
gcgagagatacggacagtggctggttggattcgtttgactac

SEQ ID NO: 3934 - DNA, 63 bp, Artificial Sequence
  Synthetic polynucleotide encoding artificial human antibody CDR-H3 region
gcgacagatcaggggtgtgatgatggcagctgctatgtaggccactactacggaatggacgtc

SEQ ID NO: 3935 - DNA, 30 bp, Artificial Sequence
  Synthetic polynucleotide encoding artificial human antibody CDR-H3 region
gggaggattatgactccctcgattgacctc

SEQ ID NO: 3936 - DNA, 39 bp, Artificial Sequence
  Synthetic polynucleotide encoding artificial human antibody CDR-H3 region
gcgagagaaggacgggggggaggagacttctttgactac

SEQ ID NO: 3937 - DNA, 45 bp, Artificial Sequence
  Synthetic polynucleotide encoding artificial human antibody CDR-H3 region
gcaaaagatggggacagtttgggggatttctctacttttgatatc

SEQ ID NO: 3938 - DNA, 36 bp, Artificial Sequence
  Synthetic polynucleotide encoding artificial human antibody CDR-H3 region
gcaagagacggctatgactttcgggcttttgaccac

SEQ ID NO: 3939 - DNA, 60 bp, Artificial Sequence
  Synthetic polynucleotide encoding artificial human antibody CDR-H3 region
gcgcgagctcgcggtgggggtttttgtagtaatatggactgcccggcaatgtttgactac

SEQ ID NO: 3940 - DNA, 27 bp, Artificial Sequence
  Synthetic polynucleotide encoding artificial human antibody CDR-H3 region
accacgattcatgactacggtgaccac

SEQ ID NO: 3941 - DNA, 30 bp, Artificial Sequence
  Synthetic polynucleotide encoding artificial human antibody CDR-H3 region
gcgaggggccttttacgatccctggacgtc

SEQ ID NO: 3942 - DNA, 42 bp, Artificial Sequence
  Synthetic polynucleotide encoding artificial human antibody CDR-H3 region
gctagagtgaaactgggggcatcgagccgtgtttttgatgtc

SEQ ID NO: 3943 - DNA, 39 bp, Artificial Sequence
  Synthetic polynucleotide encoding artificial human antibody CDR-H3 region
gcgacaaccgttacacctaaggtgaccagttttgcttcc

SEQ ID NO: 3944 - DNA, 45 bp, Artificial Sequence
  Synthetic polynucleotide encoding artificial human antibody CDR-H3 region
gcgagagaacagagccccctttatttcggtccatctttggacgtc

SEQ ID NO: 3945 - DNA, 36 bp, Artificial Sequence
  Synthetic polynucleotide encoding artificial human antibody CDR-H3 region
gcgagagagccttactcctcctacgctatggacgtc

SEQ ID NO: 3946 - DNA, 36 bp, Artificial Sequence
  Synthetic polynucleotide encoding artificial human antibody CDR-H3 region
gcgaaagatggatccgagatgttattgtgtgactac

SEQ ID NO: 3947 - DNA, 33 bp, Artificial Sequence
  Synthetic polynucleotide encoding artificial human antibody CDR-H3 region
gcgagagacactaggtggcgagggttggacagc

SEQ ID NO: 3948 - DNA, 39 bp, Artificial Sequence
  Synthetic polynucleotide encoding artificial human antibody CDR-H3 region
gcaaaagatctgttagcagtgcctggcctacttgacgac

SEQ ID NO: 3949 - DNA, 42 bp, Artificial Sequence
  Synthetic polynucleotide encoding artificial human antibody CDR-H3 region
gcgagtcggggtggatcttctcgccggtacggtatgggcgtc

SEQ ID NO: 3950 - DNA, 48 bp, Artificial Sequence
  Synthetic polynucleotide encoding artificial human antibody CDR-H3 region
gtgaaattgaagggcattggcgctatgtggacgtacgctatggacgtc

SEQ ID NO: 3951 - DNA, 54 bp, Artificial Sequence
  Synthetic polynucleotide encoding artificial human antibody CDR-H3 region
gcgagagatcagggctacggtgattacgactatcccagagactggatcgaaccc

SEQ ID NO: 3952 - DNA, 48 bp, Artificial Sequence
  Synthetic polynucleotide encoding artificial human antibody CDR-H3 region
gcgagcgtccgagacctcgtcagtggcaccacttactactatcactac

SEQ ID NO: 3953 - DNA, 30 bp, Artificial Sequence
  Synthetic polynucleotide encoding artificial human antibody CDR-H3 region
gcgagatacggtgactactcctttgacccc

SEQ ID NO: 3954 - DNA, 39 bp, Artificial Sequence
  Synthetic polynucleotide encoding artificial human antibody CDR-H3 region
gcgagagtcgtagacacagttttggcagactttgactac

SEQ ID NO: 3955 - DNA, 42 bp, Artificial Sequence
  Synthetic polynucleotide encoding artificial human antibody CDR-H3 region
gcgcgatcagggggctttggctggtcaagggaccttgactac

SEQ ID NO: 3956 - DNA, 48 bp, Artificial Sequence
  Synthetic polynucleotide encoding artificial human antibody CDR-H3 region
gcgagacatggattttggagtggccccatacccgacgcttttgatatc

SEQ ID NO: 3957 - DNA, 36 bp, Artificial Sequence
  Synthetic polynucleotide encoding artificial human antibody CDR-H3 region
gcgcacgaagactatggttcggggaatggtaattac

SEQ ID NO: 3958 - DNA, 45 bp, Artificial Sequence
  Synthetic polynucleotide encoding artificial human antibody CDR-H3 region
gcgagagaccgcgacagtggctacgagaggaattgtctcgacccc

SEQ ID NO: 3959 - DNA, 66 bp, Artificial Sequence
  Synthetic polynucleotide encoding artificial human antibody CDR-H3 region
gcgaggggggccccttatggttcgcgaatttattatgattacgactcctaccatggtatggacgtc

SEQ ID NO: 3960 - DNA, 48 bp, Artificial Sequence
  Synthetic polynucleotide encoding artificial human antibody CDR-H3 region
gcgagaggaaagtttgactggttccctcgtgtgtcctcctttgactac

SEQ ID NO: 3961 - DNA, 39 bp, Artificial Sequence
  Synthetic polynucleotide encoding artificial human antibody CDR-H3 region
gcggccgcctattatattgatactagcggctttgactac

SEQ ID NO: 3962 - DNA, 54 bp, Artificial Sequence
  Synthetic polynucleotide encoding artificial human antibody CDR-H3 region
gcgaaaggacggacgtatagcaataactggttatttcactggtacttcgatctc

SEQ ID NO: 3963 - DNA, 39 bp, Artificial Sequence
  Synthetic polynucleotide encoding artificial human antibody CDR-H3 region
gcgagagtttttagtacgatatttcatggggtcgacccc

SEQ ID NO: 3964 - DNA, 45 bp, Artificial Sequence
  Synthetic polynucleotide encoding artificial human antibody CDR-H3 region
gcgagacacttaagcagtggcgaataccactacggtttggacgtc

SEQ ID NO: 3965 - DNA, 39 bp, Artificial Sequence
  Synthetic polynucleotide encoding artificial human antibody CDR-H3 region
gcgaaaggaaagggtatagtgggagccacctttgactac

SEQ ID NO: 3966 - DNA, 54 bp, Artificial Sequence
  Synthetic polynucleotide encoding artificial human antibody CDR-H3 region
gcgagagatgcgctagattttgactggttattgtcagccgggggctttgactac

SEQ ID NO: 3967 - DNA, 33 bp, Artificial Sequence
  Synthetic polynucleotide encoding artificial human antibody CDR-H3 region
gcgagactacttgtggggggtgcttttgatatc

SEQ ID NO: 3968 - DNA, 54 bp, Artificial Sequence
  Synthetic polynucleotide encoding artificial human antibody CDR-H3 region
accccaggatcttgtagtggtggtagctgctactccggcgatgcttttgatatc

SEQ ID NO: 3969 - DNA, 45 bp, Artificial Sequence
  Synthetic polynucleotide encoding artificial human antibody CDR-H3 region
gcgagagagtcccttgatagtgcctcatatagtaccatcgcacat

SEQ ID NO: 3970 - DNA, 45 bp, Artificial Sequence
  Synthetic polynucleotide encoding artificial human antibody CDR-H3 region
gcgagagatcgaggaggcaacagctggcttgatgtttttgatatg

SEQ ID NO: 3971 - DNA, 45 bp, Artificial Sequence
  Synthetic polynucleotide encoding artificial human antibody CDR-H3 region
gcgagatcccccgccgcctttggctcagagagttactttgactcc

SEQ ID NO: 3972 - DNA, 51 bp, Artificial Sequence
  Synthetic polynucleotide encoding artificial human antibody CDR-H3 region
gcgaaagatcttctagaggacccatacttcggggacttattgtttgactac

SEQ ID NO: 3973 - DNA, 36 bp, Artificial Sequence
  Synthetic polynucleotide encoding artificial human antibody CDR-H3 region
gtgaggacccccgctgttggcaccgaccctgactac

SEQ ID NO: 3974 - DNA, 36 bp, Artificial Sequence
  Synthetic polynucleotide encoding artificial human antibody CDR-H3 region
tcgagtggggggtccacatcgatggttgggagatac

SEQ ID NO: 3975 - DNA, 42 bp, Artificial Sequence
  Synthetic polynucleotide encoding artificial human antibody CDR-H3 region
gcacggatgaccccattcaagtttggactatgccctgactac

SEQ ID NO: 3976 - DNA, 42 bp, Artificial Sequence
  Synthetic polynucleotide encoding artificial human antibody CDR-H3 region
gcgagagtagtggtggtaggtacagactacggtatggacgtc

SEQ ID NO: 3977 - DNA, 42 bp, Artificial Sequence
  Synthetic polynucleotide encoding artificial human antibody CDR-H3 region
gcgagagatcaaggactggagagggctaactggttcgacccc

SEQ ID NO: 3978 - DNA, 27 bp, Artificial Sequence
  Synthetic polynucleotide encoding artificial human antibody CDR-H3 region
gcaagaggtgtccgccactttgactac

SEQ ID NO: 3979 - DNA, 36 bp, Artificial Sequence
  Synthetic polynucleotide encoding artificial human antibody CDR-H3 region
gcgagagagtcacctttaactgtcgtctttgactac

SEQ ID NO: 3980 - DNA, 33 bp, Artificial Sequence
  Synthetic polynucleotide encoding artificial human antibody CDR-H3 region
gcgagggaatcctcagcagctggttatgactac

SEQ ID NO: 3981 - DNA, 48 bp, Artificial Sequence
  Synthetic polynucleotide encoding artificial human antibody CDR-H3 region
gcgagaaagcttatgtctggcatagtgtctcggggctggttcgacccc

SEQ ID NO: 3982 - DNA, 42 bp, Artificial Sequence
  Synthetic polynucleotide encoding artificial human antibody CDR-H3 region
gcgagagatcgcggtgactacgttacccactggttcgacccc

SEQ ID NO: 3983 - DNA, 39 bp, Artificial Sequence
  Synthetic polynucleotide encoding artificial human antibody CDR-H3 region
gcgagacatagggttggcgacagcccgggactccactac

SEQ ID NO: 3984 - DNA, 36 bp, Artificial Sequence
  Synthetic polynucleotide encoding artificial human antibody CDR-H3 region
gcgagccctatagcagtggctgccccctttgcctac

SEQ ID NO: 3985 - DNA, 51 bp, Artificial Sequence
  Synthetic polynucleotide encoding artificial human antibody CDR-H3 region
gtgaaggattatcttgctgttggtgggacctactacgactactttgactac

SEQ ID NO: 3986 - DNA, 33 bp, Artificial Sequence
  Synthetic polynucleotide encoding artificial human antibody CDR-H3 region
gcgagacatgactaccgtaactactttgactac

SEQ ID NO: 3987 - DNA, 45 bp, Artificial Sequence
  Synthetic polynucleotide encoding artificial human antibody CDR-H3 region
gcgaccccaccgtctcgatatggtggaaactactacgcagactac

SEQ ID NO: 3988 - DNA, 33 bp, Artificial Sequence
  Synthetic polynucleotide encoding artificial human antibody CDR-H3 region
gcgagacaagggccgacagtagcgattgacttc

SEQ ID NO: 3989 - DNA, 27 bp, Artificial Sequence
  Synthetic polynucleotide encoding artificial human antibody CDR-H3 region
gcgagacggggtagagagtttgattac

SEQ ID NO: 3990 - DNA, 51 bp, Artificial Sequence
  Synthetic polynucleotide encoding artificial human antibody CDR-H3 region
gcgatccaggaaaaacgggaactgcaactacgtcgagaactagataactac

SEQ ID NO: 3991 - DNA, 30 bp, Artificial Sequence
  Synthetic polynucleotide encoding artificial human antibody CDR-H3 region
gcgagagtatttcgatacggtatggacgtc

SEQ ID NO: 3992 - DNA, 30 bp, Artificial Sequence
  Synthetic polynucleotide encoding artificial human antibody CDR-H3 region
gcgatcaaagaaggctacggtctttcagac

SEQ ID NO: 3993 - DNA, 36 bp, Artificial Sequence
  Synthetic polynucleotide encoding artificial human antibody CDR-H3 region
gcgaaagaggatggctacactcaaaattttgactac

SEQ ID NO: 3994 - DNA, 42 bp, Artificial Sequence
  Synthetic polynucleotide encoding artificial human antibody CDR-H3 region
gcgagagttctggacttttatggaagtagtgtcctagactac

SEQ ID NO: 3995 - DNA, 24 bp, Artificial Sequence
  Synthetic polynucleotide encoding artificial human antibody CDR-H3 region
gcgagagatcggcccggggactac

SEQ ID NO: 3996 - DNA, 33 bp, Artificial Sequence
  Synthetic polynucleotide encoding artificial human antibody CDR-H3 region
gcgagagatcttggtgtgggatctactacctac

SEQ ID NO: 3997 - DNA, 42 bp, Artificial Sequence
  Synthetic polynucleotide encoding artificial human antibody CDR-H3 region
gtgaaagatttggaggtttctataggtcacaattttgacttt

SEQ ID NO: 3998 - DNA, 60 bp, Artificial Sequence
  Synthetic polynucleotide encoding artificial human antibody CDR-H3 region
gcgagagataggggggtagtggtggtagctgctaccccttactactacggtatggacgtc

SEQ ID NO: 3999 - DNA, 51 bp, Artificial Sequence
  Synthetic polynucleotide encoding artificial human antibody CDR-H3 region
gtacacgcacgagatgactacggtgactccgcttggtcaactgggcctgtc

SEQ ID NO: 4000 - DNA, 51 bp, Artificial Sequence
  Synthetic polynucleotide encoding artificial human antibody CDR-H3 region
ggacacagacgtctgttaaggggggttactactactgtctatttcgacccc

SEQ ID NO: 4001 - DNA, 51 bp, Artificial Sequence
  Synthetic polynucleotide encoding artificial human antibody CDR-H3 region
gcgagaggaggggagctgctgggcggattcggctacagtggtatggacgtc

SEQ ID NO: 4002 - DNA, 57 bp, Artificial Sequence
  Synthetic polynucleotide encoding artificial human antibody CDR-H3 region
gcgcattattattatgatagtagtggttattaccaaaacgctgaatacttccagtac

SEQ ID NO: 4003 - DNA, 63 bp, Artificial Sequence
  Synthetic polynucleotide encoding artificial human antibody CDR-H3 region
gcgagaacccagtgggggaccgatgtagaggcaacgaatccctactactatttcatggacgtc

SEQ ID NO: 4004 - DNA, 36 bp, Artificial Sequence
  Synthetic polynucleotide encoding artificial human antibody CDR-H3 region
gcgcgagatcagagtggagctgacagatttgactcc

SEQ ID NO: 4005 - DNA, 39 bp, Artificial Sequence
  Synthetic polynucleotide encoding artificial human antibody CDR-H3 region
gcgagatcttcgaagtggacggactggcattttgactac

SEQ ID NO: 4006 - DNA, 42 bp, Artificial Sequence
  Synthetic polynucleotide encoding artificial human antibody CDR-H3 region
gcgagagatctcgacgaaataaatagttcttggctcgacccc

SEQ ID NO: 4007 - DNA, 51 bp, Artificial Sequence
  Synthetic polynucleotide encoding artificial human antibody CDR-H3 region
gcgaaacgccccaccgctggaaacagctatggtggatactactttgaccat

SEQ ID NO: 4008 - DNA, 57 bp, Artificial Sequence
  Synthetic polynucleotide encoding artificial human antibody CDR-H3 region
gcgagacggggcgaagtcgggactatggttcgggttttccgaaagccgtttgactac

SEQ ID NO: 4009 - DNA, 54 bp, Artificial Sequence
  Synthetic polynucleotide encoding artificial human antibody CDR-H3 region
gcgacaacctcgactatgccaatgcctactagagggagagactggttcgacccc

SEQ ID NO: 4010 - DNA, 33 bp, Artificial Sequence
  Synthetic polynucleotide encoding artificial human antibody CDR-H3 region
gcgggtgcccacggtgactacggtcttgactat

SEQ ID NO: 4011 - DNA, 45 bp, Artificial Sequence
  Synthetic polynucleotide encoding artificial human antibody CDR-H3 region
gcgagacatcagcagaagtatagccccatttccccgcttgactac

SEQ ID NO: 4012 - DNA, 39 bp, Artificial Sequence
  Synthetic polynucleotide encoding artificial human antibody CDR-H3 region
gcaaaagacgcacgcctggcttattatggtatggacgtc

SEQ ID NO: 4013 - DNA, 36 bp, Artificial Sequence
  Synthetic polynucleotide encoding artificial human antibody CDR-H3 region
gcgagacactcgagtggttattcagaacttgcctac

SEQ ID NO: 4014 - DNA, 42 bp, Artificial Sequence
  Synthetic polynucleotide encoding artificial human antibody CDR-H3 region
gcgagagtccacaattgggacttctactacggtatggacgtc

SEQ ID NO: 4015 - DNA, 45 bp, Artificial Sequence
  Synthetic polynucleotide encoding artificial human antibody CDR-H3 region
actagagagaggccccctaattgtggatctagctgccccgagacc

SEQ ID NO: 4016 - DNA, 36 bp, Artificial Sequence
  Synthetic polynucleotide encoding artificial human antibody CDR-H3 region
gcgagagtcgggacatctcattggtactctgattct

SEQ ID NO: 4017 - DNA, 30 bp, Artificial Sequence
  Synthetic polynucleotide encoding artificial human antibody CDR-H3 region
gcgagagacgaggggcgaagagagggcgcc

SEQ ID NO: 4018 - DNA, 39 bp, Artificial Sequence
  Synthetic polynucleotide encoding artificial human antibody CDR-H3 region
gcgagagatatcgcgctgggacggggcggtatggacgtc

SEQ ID NO: 4019 - DNA, 36 bp, Artificial Sequence
  Synthetic polynucleotide encoding artificial human antibody CDR-H3 region
gcgagacatagaacgggccaatattactataatagt

SEQ ID NO: 4020 - DNA, 33 bp, Artificial Sequence
  Synthetic polynucleotide encoding artificial human antibody CDR-H3 region
gcggcgtccggctacggtgaccacgtggcctac

SEQ ID NO: 4021 - DNA, 48 bp, Artificial Sequence
  Synthetic polynucleotide encoding artificial human antibody CDR-H3 region
gcgagagggaatggacctaagagtgggaagtactcggactttgactac

SEQ ID NO: 4022 - DNA, 30 bp, Artificial Sequence
  Synthetic polynucleotide encoding artificial human antibody CDR-H3 region
gcgagagataagtcctggtactttgactac

SEQ ID NO: 4023 - DNA, 45 bp, Artificial Sequence
  Synthetic polynucleotide encoding artificial human antibody CDR-H3 region
gcgagatccaccgctagtagtggttattatgatgcttttgatatc

SEQ ID NO: 4024 - DNA, 66 bp, Artificial Sequence
  Synthetic polynucleotide encoding artificial human antibody CDR-H3 region
gcgagagatcgtcgagagtatagcagctcgtcccggccttcatatcactactactacatggacgtc

SEQ ID NO: 4025 - DNA, 39 bp, Artificial Sequence
  Synthetic polynucleotide encoding artificial human antibody CDR-H3 region
gcgtcccgatatagaagcccgtccggtgcttttgacatc

SEQ ID NO: 4026 - DNA, 24 bp, Artificial Sequence
  Synthetic polynucleotide encoding artificial human antibody CDR-H3 region
accagaggagcagtggccgactac

SEQ ID NO: 4027 - DNA, 42 bp, Artificial Sequence
  Synthetic polynucleotide encoding artificial human antibody CDR-H3 region
gcgacctcccacggaggactagtgcctggcggcgaaaactac

SEQ ID NO: 4028 - DNA, 48 bp, Artificial Sequence
  Synthetic polynucleotide encoding artificial human antibody CDR-H3 region
gtgagagaggagtttggagtggttcgtggacctaatccctttgatgtc

SEQ ID NO: 4029 - DNA, 57 bp, Artificial Sequence
  Synthetic polynucleotide encoding artificial human antibody CDR-H3 region
gcgaaaacccgttcttatagttccgctgacactactcgtcccaatgccccgggctac

SEQ ID NO: 4030 - DNA, 45 bp, Artificial Sequence
  Synthetic polynucleotide encoding artificial human antibody CDR-H3 region
gcgaaagatggccaaactggaactacaaccccatactttgactac

SEQ ID NO: 4031 - DNA, 30 bp, Artificial Sequence
  Synthetic polynucleotide encoding artificial human antibody CDR-H3 region
gcgagagccggggctgagggcgttgactat

SEQ ID NO: 4032 - DNA, 42 bp, Artificial Sequence
  Synthetic polynucleotide encoding artificial human antibody CDR-H3 region
gcgagacgatccgataaagcagtgcctgggacctttgaccag

SEQ ID NO: 4033 - DNA, 45 bp, Artificial Sequence
  Synthetic polynucleotide encoding artificial human antibody CDR-H3 region
gcacacagggggggaaagaaccctcgttattggtacttcgatctc

SEQ ID NO: 4034 - DNA, 39 bp, Artificial Sequence
  Synthetic polynucleotide encoding artificial human antibody CDR-H3 region
gcgagaggggaggggggggaattatgggcctttgactac

SEQ ID NO: 4035 - DNA, 42 bp, Artificial Sequence
  Synthetic polynucleotide encoding artificial human antibody CDR-H3 region
gcgagagaggggcttcgtctggcacgtggctggtttcacccc

SEQ ID NO: 4036 - DNA, 36 bp, Artificial Sequence
  Synthetic polynucleotide encoding artificial human antibody CDR-H3 region
gcgagagattttgatgatggctacgacatccgttac

SEQ ID NO: 4037 - DNA, 39 bp, Artificial Sequence
  Synthetic polynucleotide encoding artificial human antibody CDR-H3 region
gtgaaatcaccagtggccgcaaatgatgcttttgatatc

SEQ ID NO: 4038 - DNA, 39 bp, Artificial Sequence
  Synthetic polynucleotide encoding artificial human antibody CDR-H3 region
gcgagagtgtctgtggccgccccaacgtgcttggactac

SEQ ID NO: 4039 - DNA, 45 bp, Artificial Sequence
  Synthetic polynucleotide encoding artificial human antibody CDR-H3 region
gcgagacattcagggcacgatcagttgccgctagactttgacaac

SEQ ID NO: 4040 - DNA, 27 bp, Artificial Sequence
  Synthetic polynucleotide encoding artificial human antibody CDR-H3 region
gcaggaggaggaagtcaagtggacttc

SEQ ID NO: 4041 - DNA, 51 bp, Artificial Sequence
  Synthetic polynucleotide encoding artificial human antibody CDR-H3 region
gcacacagattcgggagaggggtgtcctactactactacggtatggacgtc

SEQ ID NO: 4042 - DNA, 36 bp, Artificial Sequence
  Synthetic polynucleotide encoding artificial human antibody CDR-H3 region
gcgaaagatagtgggagcaacgacgacatggacgtc

SEQ ID NO: 4043 - DNA, 39 bp, Artificial Sequence
  Synthetic polynucleotide encoding artificial human antibody CDR-H3 region
gcgagaagaggtttttactactactacggtatggacgtc

SEQ ID NO: 4044 - DNA, 30 bp, Artificial Sequence
  Synthetic polynucleotide encoding artificial human antibody CDR-H3 region
gcgagtctcctcgggggcgatcctgactac

SEQ ID NO: 4045 - DNA, 60 bp, Artificial Sequence
  Synthetic polynucleotide encoding artificial human antibody CDR-H3 region
gcacggatgcaaatagtggctacgacacagacctactactactactacggtatggacgtc

SEQ ID NO: 4046 - DNA, 39 bp, Artificial Sequence
  Synthetic polynucleotide encoding artificial human antibody CDR-H3 region
gcgagagcgggctacgatcttttcggctggttcgacccc

SEQ ID NO: 4047 - DNA, 57 bp, Artificial Sequence
  Synthetic polynucleotide encoding artificial human antibody CDR-H3 region
gcgaaacccaactcccctttcactggcagtggaagtttccacaactactttgactac

SEQ ID NO: 4048 - DNA, 18 bp, Artificial Sequence
  Synthetic polynucleotide encoding artificial human antibody CDR-H3 region
gcgagtcccgttcgaccc

SEQ ID NO: 4049 - DNA, 63 bp, Artificial Sequence
  Synthetic polynucleotide encoding artificial human antibody CDR-H3 region
gcgagaggattttgtgatcttcccgcctgttatcccgtacctcaatacaactggttcgacccc

SEQ ID NO: 4050 - DNA, 39 bp, Artificial Sequence
  Synthetic polynucleotide encoding artificial human antibody CDR-H3 region
gcgcgatatagtgggagctaccctttgggctttgactac

SEQ ID NO: 4051 - DNA, 27 bp, Artificial Sequence
  Synthetic polynucleotide encoding artificial human antibody CDR-H3 region
gcgagacatgaaggtgcttttgatatc

SEQ ID NO: 4052 - DNA, 36 bp, Artificial Sequence
  Synthetic polynucleotide encoding artificial human antibody CDR-H3 region
accacagatcttgcggtgactacgcgatttgactac

SEQ ID NO: 4053 - DNA, 33 bp, Artificial Sequence
  Synthetic polynucleotide encoding artificial human antibody CDR-H3 region
gcgagaagcacacgtacagacgctttggacgtc

SEQ ID NO: 4054 - DNA, 39 bp, Artificial Sequence
  Synthetic polynucleotide encoding artificial human antibody CDR-H3 region
gctaaaaatgacgagatggactttaagggctatgactac

SEQ ID NO: 4055 - DNA, 27 bp, Artificial Sequence
  Synthetic polynucleotide encoding artificial human antibody CDR-H3 region
gcgagaggggagttattattcgaccac

SEQ ID NO: 4056 - DNA, 30 bp, Artificial Sequence
  Synthetic polynucleotide encoding artificial human antibody CDR-H3 region
gctagagaatctacggtggttcttgacttc

SEQ ID NO: 4057 - DNA, 36 bp, Artificial Sequence
  Synthetic polynucleotide encoding artificial human antibody CDR-H3 region
gcgaaaaggtcaacagcagtgggggacttcgacccc

SEQ ID NO: 4058 - DNA, 48 bp, Artificial Sequence
  Synthetic polynucleotide encoding artificial human antibody CDR-H3 region
gcgcgggggccgtccaactggaacgggggtccggagcacatggacgtc

SEQ ID NO: 4059 - DNA, 18 bp, Artificial Sequence
  Synthetic polynucleotide encoding artificial human antibody CDR-H3 region
gcgagagattttgactac

SEQ ID NO: 4060 - DNA, 42 bp, Artificial Sequence
  Synthetic polynucleotide encoding artificial human antibody CDR-H3 region
gcgagagatccctatggttcggggacggtctggttcgacccc

SEQ ID NO: 4061 - DNA, 60 bp, Artificial Sequence
  Synthetic polynucleotide encoding artificial human antibody CDR-H3 region
gcgaaaactgagtacacttttttgagtggctccgactactaccagtacggtatggacgtc

SEQ ID NO: 4062 - DNA, 48 bp, Artificial Sequence
  Synthetic polynucleotide encoding artificial human antibody CDR-H3 region
gcgagacgggggttattgcgtgggagcaacgagggaaggtttgactac

SEQ ID NO: 4063 - DNA, 45 bp, Artificial Sequence
  Synthetic polynucleotide encoding artificial human antibody CDR-H3 region
actagacgcggcagtgcctggacggacccctactacacggacgtc

SEQ ID NO: 4064 - DNA, 33 bp, Artificial Sequence
  Synthetic polynucleotide encoding artificial human antibody CDR-H3 region
gcgagagatgatgtccctaggggttatgactac

SEQ ID NO: 4065 - DNA, 39 bp, Artificial Sequence
  Synthetic polynucleotide encoding artificial human antibody CDR-H3 region
gcgagagagtacattgtacccttctacggtatggacgtc

SEQ ID NO: 4066 - DNA, 27 bp, Artificial Sequence
  Synthetic polynucleotide encoding artificial human antibody CDR-L3 region
caacagactaacactttccccctcact

SEQ ID NO: 4067 - DNA, 27 bp, Artificial Sequence
  Synthetic polynucleotide encoding artificial human antibody CDR-L3 region
caacagagttacagtacccctccgcgt

SEQ ID NO: 4068 - DNA, 27 bp, Artificial Sequence
  Synthetic polynucleotide encoding artificial human antibody CDR-L3 region
caacagtctaacagtttccccgggact

SEQ ID NO: 4069 - DNA, 33 bp, Artificial Sequence
  Synthetic polynucleotide encoding artificial human antibody CDR-L3 region
gcagcatgggaggacagcctgagtggtccggtg

SEQ ID NO: 4070 - DNA, 27 bp, Artificial Sequence
  Synthetic polynucleotide encoding artificial human antibody CDR-L3 region
aactcccgggacaggagtggttatgtc

SEQ ID NO: 4071 - DNA, 33 bp, Artificial Sequence
  Synthetic polynucleotide encoding artificial human antibody CDR-L3 region
caggtgtgggataatggtcattctcattgggtg

SEQ ID NO: 4072 - DNA, 27 bp, Artificial Sequence
  Synthetic polynucleotide encoding artificial human antibody CDR-L3 region
caacagagttacagaatgccttgcagt

SEQ ID NO: 4073 - DNA, 30 bp, Artificial Sequence
  Synthetic polynucleotide encoding artificial human antibody CDR-L3 region
cagcagtatggtagctcacctcccatcacc

SEQ ID NO: 4074 - DNA, 27 bp, Artificial Sequence
  Synthetic polynucleotide encoding artificial human antibody CDR-L3 region
cagtcttatgatacaaccaatgtgata

SEQ ID NO: 4075 - DNA, 27 bp, Artificial Sequence
  Synthetic polynucleotide encoding artificial human antibody CDR-L3 region
caacagtatgatagttcacccttcact

SEQ ID NO: 4076 - DNA, 30 bp, Artificial Sequence
  Synthetic polynucleotide encoding artificial human antibody CDR-L3 region
ggaacatgggatgacaacctgagtgctgta

SEQ ID NO: 4077 - DNA, 27 bp, Artificial Sequence
  Synthetic polynucleotide encoding artificial human antibody CDR-L3 region
ctgcaaggtacacactggcctccgacg

SEQ ID NO: 4078 - DNA, 33 bp, Artificial Sequence
  Synthetic polynucleotide encoding artificial human antibody CDR-L3 region
gcagcatgggatgacaatgtgagtggtcctggc

SEQ ID NO: 4079 - DNA, 33 bp, Artificial Sequence
  Synthetic polynucleotide encoding artificial human antibody CDR-L3 region
gcaacatgggatgacagcctgaatggtccggtg

SEQ ID NO: 4080 - DNA, 24 bp, Artificial Sequence
  Synthetic polynucleotide encoding artificial human antibody CDR-L3 region
cagcagtataataactggtggacg

SEQ ID NO: 4081 - DNA, 27 bp, Artificial Sequence
  Synthetic polynucleotide encoding artificial human antibody CDR-L3 region
cagcaatatggtagttttcggtacact

SEQ ID NO: 4082 - DNA, 30 bp, Artificial Sequence
  Synthetic polynucleotide encoding artificial human antibody CDR-L3 region
caatcagcagacagcagtgatacttatgtg

SEQ ID NO: 4083 - DNA, 27 bp, Artificial Sequence
  Synthetic polynucleotide encoding artificial human antibody CDR-L3 region
cagcagcgtagcaactggcctctcact

SEQ ID NO: 4084 - DNA, 30 bp, Artificial Sequence
  Synthetic polynucleotide encoding artificial human antibody CDR-L3 region
cagcagggtagcaactggttggcgctcact

SEQ ID NO: 4085 - DNA, 27 bp, Artificial Sequence
  Synthetic polynucleotide encoding artificial human antibody CDR-L3 region
caacagtattatattaaccctcggacg

SEQ ID NO: 4086 - DNA, 27 bp, Artificial Sequence
  Synthetic polynucleotide encoding artificial human antibody CDR-L3 region
cagcaatattatagtactccgtacact

SEQ ID NO: 4087 - DNA, 27 bp, Artificial Sequence
  Synthetic polynucleotide encoding artificial human antibody CDR-L3 region
caacagagtttcaacaccgtgctcact

SEQ ID NO: 4088 - DNA, 33 bp, Artificial Sequence
  Synthetic polynucleotide encoding artificial human antibody CDR-L3 region
agctcatatacaatcaccagcacgctttgggtg

SEQ ID NO: 4089 - DNA, 33 bp, Artificial Sequence
  Synthetic polynucleotide encoding artificial human antibody CDR-L3 region
gcagcatgggatgacagcctgagtggtccggta

SEQ ID NO: 4090 - DNA, 27 bp, Artificial Sequence
  Synthetic polynucleotide encoding artificial human antibody CDR-L3 region
cagcagacttacagtaatccttggacg

SEQ ID NO: 4091 - DNA, 27 bp, Artificial Sequence
  Synthetic polynucleotide encoding artificial human antibody CDR-L3 region
caacagacttacagtcaccctcgcacg

SEQ ID NO: 4092 - DNA, 33 bp, Artificial Sequence
  Synthetic polynucleotide encoding artificial human antibody CDR-L3 region
cagtcctatgacagcagcctgagtggttatgtc

SEQ ID NO: 4093 - DNA, 33 bp, Artificial Sequence
  Synthetic polynucleotide encoding artificial human antibody CDR-L3 region
caggtgtgggatagtagtagtgatcattatgtc

SEQ ID NO: 4094 - DNA, 27 bp, Artificial Sequence
  Synthetic polynucleotide encoding artificial human antibody CDR-L3 region
caacagactagcagtttccctcgaact

SEQ ID NO: 4095 - DNA, 30 bp, Artificial Sequence
  Synthetic polynucleotide encoding artificial human antibody CDR-L3 region
caatcagtagacattacttctacttgggtg

SEQ ID NO: 4096 - DNA, 33 bp, Artificial Sequence
  Synthetic polynucleotide encoding artificial human antibody CDR-L3 region
agctcatatataagtagcctcacttatgtgctg

SEQ ID NO: 4097 - DNA, 33 bp, Artificial Sequence
  Synthetic polynucleotide encoding artificial human antibody CDR-L3 region
ggaacatgggatagtagcctgagtgttggggtg

SEQ ID NO: 4098 - DNA, 27 bp, Artificial Sequence
  Synthetic polynucleotide encoding artificial human antibody CDR-L3 region
atgcaaggtacacactggccgatcacc

SEQ ID NO: 4099 - DNA, 27 bp, Artificial Sequence
  Synthetic polynucleotide encoding artificial human antibody CDR-L3 region
cagcagtatgatagctcatcgtggacg

SEQ ID NO: 4100 - DNA, 33 bp, Artificial Sequence
  Synthetic polynucleotide encoding artificial human antibody CDR-L3 region
cagtcgtatgacagcagcctgagaggtgtggtg

SEQ ID NO: 4101 - DNA, 27 bp, Artificial Sequence
  Synthetic polynucleotide encoding artificial human antibody CDR-L3 region
caacagagttacagtacccctcggacg

SEQ ID NO: 4102 - DNA, 27 bp, Artificial Sequence
  Synthetic polynucleotide encoding artificial human antibody CDR-L3 region
cagcaatattatagcactccgtggacg

SEQ ID NO: 4103 - DNA, 39 bp, Artificial Sequence
  Synthetic polynucleotide encoding artificial human antibody CDR-L3 region
cagtcctatgacagcggcctgagtggttcgaaggtggtc

SEQ ID NO: 4104 - DNA, 27 bp, Artificial Sequence
  Synthetic polynucleotide encoding artificial human antibody CDR-L3 region
cagtcttatgatctcagcacttgggtg

SEQ ID NO: 4105 - DNA, 27 bp, Artificial Sequence
  Synthetic polynucleotide encoding artificial human antibody CDR-L3 region
caccagagttacagtacctctctcact

SEQ ID NO: 4106 - DNA, 33 bp, Artificial Sequence
  Synthetic polynucleotide encoding artificial human antibody CDR-L3 region
caggtgtgggatagtagtagtgatcattgggtg

SEQ ID NO: 4107 - DNA, 30 bp, Artificial Sequence
  Synthetic polynucleotide encoding artificial human antibody CDR-L3 region
agctcatatacaagcagcagcactcaggta

SEQ ID NO: 4108 - DNA, 27 bp, Artificial Sequence
  Synthetic polynucleotide encoding artificial human antibody CDR-L3 region
caacagagttacagtacccctaagacg

SEQ ID NO: 4109 - DNA, 30 bp, Artificial Sequence
  Synthetic polynucleotide encoding artificial human antibody CDR-L3 region
caacagtttaatacttaccctctgtacacc

SEQ ID NO: 4110 - DNA, 33 bp, Artificial Sequence
  Synthetic polynucleotide encoding artificial human antibody CDR-L3 region
gactcccgggacagcagtggtaacctcgtggta

SEQ ID NO: 4111 - DNA, 27 bp, Artificial Sequence
  Synthetic polynucleotide encoding artificial human antibody CDR-L3 region
caacagactaacagtttcccccggact

SEQ ID NO: 4112 - DNA, 30 bp, Artificial Sequence
  Synthetic polynucleotide encoding artificial human antibody CDR-L3 region
caacagagttacagtgtccctccgtggacg

SEQ ID NO: 4113 - DNA, 30 bp, Artificial Sequence
  Synthetic polynucleotide encoding artificial human antibody CDR-L3 region
cagcaatatggtagctcacctcggtacact

SEQ ID NO: 4114 - DNA, 24 bp, Artificial Sequence
  Synthetic polynucleotide encoding artificial human antibody CDR-L3 region
cagcagtatggtagcgcgtggacg

SEQ ID NO: 4115 - DNA, 30 bp, Artificial Sequence
  Synthetic polynucleotide encoding artificial human antibody CDR-L3 region
cagcagcgtgccaactggcctcctatcacc

SEQ ID NO: 4116 - DNA, 27 bp, Artificial Sequence
  Synthetic polynucleotide encoding artificial human antibody CDR-L3 region
caacagtataatagttacccgtggacg

SEQ ID NO: 4117 - DNA, 36 bp, Artificial Sequence
  Synthetic polynucleotide encoding artificial human antibody CDR-L3 region
caggtgtgggatagtagtagtgatcattatgtggta

SEQ ID NO: 4118 - DNA, 30 bp, Artificial Sequence
  Synthetic polynucleotide encoding artificial human antibody CDR-L3 region
cagcagcgtagcaactggcctccgctcact

SEQ ID NO: 4119 - DNA, 27 bp, Artificial Sequence
  Synthetic polynucleotide encoding artificial human antibody CDR-L3 region
atgcaagctctacaaactccctacact

SEQ ID NO: 4120 - DNA, 24 bp, Artificial Sequence
  Synthetic polynucleotide encoding artificial human antibody CDR-L3 region
caacagtataatagttattcgacg

SEQ ID NO: 4121 - DNA, 30 bp, Artificial Sequence
  Synthetic polynucleotide encoding artificial human antibody CDR-L3 region
ttgctatatatgggcagtggcatttcggtt

SEQ ID NO: 4122 - DNA, 30 bp, Artificial Sequence
  Synthetic polynucleotide encoding artificial human antibody CDR-L3 region
cagcactatggtgcctcaccgccgtggacg

SEQ ID NO: 4123 - DNA, 36 bp, Artificial Sequence
  Synthetic polynucleotide encoding artificial human antibody CDR-L3 region
caggtgtgggatagtaataatgatcaccgggaggtg

SEQ ID NO: 4124 - DNA, 27 bp, Artificial Sequence
  Synthetic polynucleotide encoding artificial human antibody CDR-L3 region
caacagtatgatagttatcctctctct

SEQ ID NO: 4125 - DNA, 27 bp, Artificial Sequence
  Synthetic polynucleotide encoding artificial human antibody CDR-L3 region
ctacaacatgataatttcccgtacact

SEQ ID NO: 4126 - DNA, 27 bp, Artificial Sequence
  Synthetic polynucleotide encoding artificial human antibody CDR-L3 region
cagcaatacggcagttcaccgctcacc

SEQ ID NO: 4127 - DNA, 33 bp, Artificial Sequence
  Synthetic polynucleotide encoding artificial human antibody CDR-L3 region
tactcaacagacagcagtggtaatcatggggtg

SEQ ID NO: 4128 - DNA, 27 bp, Artificial Sequence
  Synthetic polynucleotide encoding artificial human antibody CDR-L3 region
atgcaagctctacaaactcctaacact

SEQ ID NO: 4129 - DNA, 33 bp, Artificial Sequence
  Synthetic polynucleotide encoding artificial human antibody CDR-L3 region
aactcatattcaagcagcagcactctttatgtc

SEQ ID NO: 4130 - DNA, 30 bp, Artificial Sequence
  Synthetic polynucleotide encoding artificial human antibody CDR-L3 region
caacaacatagcaactggcctgagctcact

SEQ ID NO: 4131 - DNA, 30 bp, Artificial Sequence
  Synthetic polynucleotide encoding artificial human antibody CDR-L3 region
agctcgtatagaagcagcggcgtttatgtc

SEQ ID NO: 4132 - DNA, 27 bp, Artificial Sequence
  Synthetic polynucleotide encoding artificial human antibody CDR-L3 region
atgcaaagtatacaccttccgtacact

SEQ ID NO: 4133 - DNA, 30 bp, Artificial Sequence
  Synthetic polynucleotide encoding artificial human antibody CDR-L3 region
caccagtatggtggctcacctccaaacact

SEQ ID NO: 4134 - DNA, 30 bp, Artificial Sequence
  Synthetic polynucleotide encoding artificial human antibody CDR-L3 region
caacaacttaatagttaccctccactcact

SEQ ID NO: 4135 - DNA, 33 bp, Artificial Sequence
  Synthetic polynucleotide encoding artificial human antibody CDR-L3 region
gcaacatgggatagcagcctgactgctggggtg

SEQ ID NO: 4136 - DNA, 27 bp, Artificial Sequence
  Synthetic polynucleotide encoding artificial human antibody CDR-L3 region
cagcagcgtagcgcctggcctatcact

SEQ ID NO: 4137 - DNA, 30 bp, Artificial Sequence
  Synthetic polynucleotide encoding artificial human antibody CDR-L3 region
cagcagtatggtagctcacggaagctcact

SEQ ID NO: 4138 - DNA, 27 bp, Artificial Sequence
  Synthetic polynucleotide encoding artificial human antibody CDR-L3 region
caacactatgacagttatccgtggacg

SEQ ID NO: 4139 - DNA, 33 bp, Artificial Sequence
  Synthetic polynucleotide encoding artificial human antibody CDR-L3 region
tgttcccgggacagcagtggtaacccttgggta

SEQ ID NO: 4140 - DNA, 27 bp, Artificial Sequence
  Synthetic polynucleotide encoding artificial human antibody CDR-L3 region
caacagagttacagcacgtcgctcact

SEQ ID NO: 4141 - DNA, 33 bp, Artificial Sequence
  Synthetic polynucleotide encoding artificial human antibody CDR-L3 region
cagcagtatgatagctcacctcccatgtacact

SEQ ID NO: 4142 - DNA, 36 bp, Artificial Sequence
  Synthetic polynucleotide encoding artificial human antibody CDR-L3 region
ggaacatgggatagcagcctgagtcctgggggggta

SEQ ID NO: 4143 - DNA, 24 bp, Artificial Sequence
  Synthetic polynucleotide encoding artificial human antibody CDR-L3 region
caacagagttacaatgcccggacg

SEQ ID NO: 4144 - DNA, 30 bp, Artificial Sequence
  Synthetic polynucleotide encoding artificial human antibody CDR-L3 region
cagcaatattatgatactgctccgctcact

SEQ ID NO: 4145 - DNA, 27 bp, Artificial Sequence
  Synthetic polynucleotide encoding artificial human antibody CDR-L3 region
cagcagtatagtaaatggcccatcacc

SEQ ID NO: 4146 - DNA, 27 bp, Artificial Sequence
  Synthetic polynucleotide encoding artificial human antibody CDR-L3 region
caacagacttacactacccctaggacg

SEQ ID NO: 4147 - DNA, 33 bp, Artificial Sequence
  Synthetic polynucleotide encoding artificial human antibody CDR-L3 region
cagtcctatgacagccgcctgagtggtgtggta

SEQ ID NO: 4148 - DNA, 27 bp, Artificial Sequence
  Synthetic polynucleotide encoding artificial human antibody CDR-L3 region
cagcagtatactaccaggcctctcact

SEQ ID NO: 4149 - DNA, 27 bp, Artificial Sequence
  Synthetic polynucleotide encoding artificial human antibody CDR-L3 region
caacagcggagcaagtggcctctcact

SEQ ID NO: 4150 - DNA, 36 bp, Artificial Sequence
  Synthetic polynucleotide encoding artificial human antibody CDR-L3 region
gcaacatgggatgacagcctgggtggccgtgtggtt

SEQ ID NO: 4151 - DNA, 27 bp, Artificial Sequence
  Synthetic polynucleotide encoding artificial human antibody CDR-L3 region
atgcaacgtatagagtttcctttcact

SEQ ID NO: 4152 - DNA, 27 bp, Artificial Sequence
  Synthetic polynucleotide encoding artificial human antibody CDR-L3 region
caggcgtgggacagcagcactgcggta

SEQ ID NO: 4153 - DNA, 27 bp, Artificial Sequence
  Synthetic polynucleotide encoding artificial human antibody CDR-L3 region
cagtcgtgggacagtagttctgtgcta

SEQ ID NO: 4154 - DNA, 27 bp, Artificial Sequence
  Synthetic polynucleotide encoding artificial human antibody CDR-L3 region
cagcaatattatggtcgtctattcact

SEQ ID NO: 4155 - DNA, 33 bp, Artificial Sequence
  Synthetic polynucleotide encoding artificial human antibody CDR-L3 region
cagcagcgtagcaactggcctccgaggctccct

SEQ ID NO: 4156 - DNA, 30 bp, Artificial Sequence
  Synthetic polynucleotide encoding artificial human antibody CDR-L3 region
cagcagcgtagcaactggcctccgtacact

SEQ ID NO: 4157 - DNA, 27 bp, Artificial Sequence
  Synthetic polynucleotide encoding artificial human antibody CDR-L3 region
atgcaagctctacaaactccgtacact

SEQ ID NO: 4158 - DNA, 27 bp, Artificial Sequence
  Synthetic polynucleotide encoding artificial human antibody CDR-L3 region
caacactatgatagttatattggaacg

SEQ ID NO: 4159 - DNA, 33 bp, Artificial Sequence
  Synthetic polynucleotide encoding artificial human antibody CDR-L3 region
ggaacatgggatagcagtttgggtggcggagtg

SEQ ID NO: 4160 - DNA, 30 bp, Artificial Sequence; identical to SEQ ID NO: 4156
  Synthetic polynucleotide encoding artificial human antibody CDR-L3 region

SEQ ID NO: 4161 - DNA, 27 bp, Artificial Sequence
  Synthetic polynucleotide encoding artificial human antibody CDR-L3 region
atggaagctgaacaaactccggggact

SEQ ID NO: 4162 - DNA, 30 bp, Artificial Sequence
  Synthetic polynucleotide encoding artificial human antibody CDR-L3 region
agctcatatacaagcagcaccactgtgctt

SEQ ID NO: 4163 - DNA, 30 bp, Artificial Sequence
  Synthetic polynucleotide encoding artificial human antibody CDR-L3 region
atgcaaggtacacactggcctccgatcacc

SEQ ID NO: 4164 - DNA, 27 bp, Artificial Sequence
  Synthetic polynucleotide encoding artificial human antibody CDR-L3 region
caccagacttacagtacccggctcact

SEQ ID NO: 4165 - DNA, 27 bp, Artificial Sequence
  Synthetic polynucleotide encoding artificial human antibody CDR-L3 region
caacagtatgataatctcccgctcact

SEQ ID NO: 4166 - DNA, 33 bp, Artificial Sequence
  Synthetic polynucleotide encoding artificial human antibody CDR-L3 region
caggtgtgggatagcagtagtgatccttgggtg

SEQ ID NO: 4167 - DNA, 30 bp, Artificial Sequence
  Synthetic polynucleotide encoding artificial human antibody CDR-L3 region
caacaactgaatagttaccctccggtcacc

SEQ ID NO: 4168 - DNA, 27 bp, Artificial Sequence
  Synthetic polynucleotide encoding artificial human antibody CDR-L3 region
caacagagttacagtaccccgtacact

SEQ ID NO: 4169 - DNA, 30 bp, Artificial Sequence
  Synthetic polynucleotide encoding artificial human antibody CDR-L3 region
caacagtatagtagttcttctccaagaacg

SEQ ID NO: 4170 - DNA, 27 bp, Artificial Sequence
  Synthetic polynucleotide encoding artificial human antibody CDR-L3 region
atgcaaagtttacaacttccgattacc

SEQ ID NO: 4171 - DNA, 30 bp, Artificial Sequence
  Synthetic polynucleotide encoding artificial human antibody CDR-L3 region
caacagagttacagtacccgtttactcact

SEQ ID NO: 4172 - DNA, 33 bp, Artificial Sequence
  Synthetic polynucleotide encoding artificial human antibody CDR-L3 region
cagtcctttgacagcagcctgagaggttatgtc

SEQ ID NO: 4173 - DNA, 33 bp, Artificial Sequence
  Synthetic polynucleotide encoding artificial human antibody CDR-L3 region
cagcaccgtatcacctggcctcccctgatcacc

SEQ ID NO: 4174 - DNA, 27 bp, Artificial Sequence
  Synthetic polynucleotide encoding artificial human antibody CDR-L3 region
cagcaatatgcttatgtaccgatcacc

SEQ ID NO: 4175 - DNA, 27 bp, Artificial Sequence
  Synthetic polynucleotide encoding artificial human antibody CDR-L3 region
cagcaatattatagtattcccctcact

SEQ ID NO: 4176 - DNA, 27 bp, Artificial Sequence
  Synthetic polynucleotide encoding artificial human antibody CDR-L3 region
cagcagtatggtagctcacccctgtgg

SEQ ID NO: 4177 - DNA, 30 bp, Artificial Sequence
  Synthetic polynucleotide encoding artificial human antibody CDR-L3 region
agctcatatacaagcagcagcactcaagtc

SEQ ID NO: 4178 - DNA, 33 bp, Artificial Sequence
  Synthetic polynucleotide encoding artificial human antibody CDR-L3 region
tactcaacagacagcagtggtaatcatagggtg

SEQ ID NO: 4179 - DNA, 30 bp, Artificial Sequence
  Synthetic polynucleotide encoding artificial human antibody CDR-L3 region
cagcagtataataactggcctcagtacact

SEQ ID NO: 4180 - DNA, 33 bp, Artificial Sequence
  Synthetic polynucleotide encoding artificial human antibody CDR-L3 region
cagcactttcgtagctcacctcccacgtacact

SEQ ID NO: 4181 - DNA, 30 bp, Artificial Sequence
  Synthetic polynucleotide encoding artificial human antibody CDR-L3 region
agctcatattcaaggaccaccactctcgta

SEQ ID NO: 4182 - DNA, 36 bp, Artificial Sequence
  Synthetic polynucleotide encoding artificial human antibody CDR-L3 region
cagtcctatgacagcggcctgagtgctccttgggtg

SEQ ID NO: 4183 - DNA, 27 bp, Artificial Sequence
  Synthetic polynucleotide encoding artificial human antibody CDR-L3 region
cagcaatatggtaactcacctcccact

SEQ ID NO: 4184 - DNA, 33 bp, Artificial Sequence
  Synthetic polynucleotide encoding artificial human antibody CDR-L3 region
gcaacctgggatgacgacctgagtggtccggtc

SEQ ID NO: 4185 - DNA, 27 bp, Artificial Sequence
  Synthetic polynucleotide encoding artificial human antibody CDR-L3 region
ctacaacatgatactttccctctgacg

SEQ ID NO: 4186 - DNA, 27 bp, Artificial Sequence
  Synthetic polynucleotide encoding artificial human antibody CDR-L3 region
caacagtataatagttattcgtggacg

SEQ ID NO: 4187 - DNA, 27 bp, Artificial Sequence
  Synthetic polynucleotide encoding artificial human antibody CDR-L3 region
caacaccttactagtttcccgtacact

SEQ ID NO: 4188 - DNA, 33 bp, Artificial Sequence
  Synthetic polynucleotide encoding artificial human antibody CDR-L3 region
ggctcccgggacagtagtggtaacccttctgtc

SEQ ID NO: 4189 - DNA, 27 bp, Artificial Sequence
  Synthetic polynucleotide encoding artificial human antibody CDR-L3 region
cagcagcgtagcaactggctgtacact

SEQ ID NO: 4190 - DNA, 36 bp, Artificial Sequence
  Synthetic polynucleotide encoding artificial human antibody CDR-L3 region
caggtgtgggatagtagtagtgatcatcaagaggta

SEQ ID NO: 4191 - DNA, 30 bp, Artificial Sequence
  Synthetic polynucleotide encoding artificial human antibody CDR-L3 region
tgctcatatgcacctagtaacacttatgtc

SEQ ID NO: 4192 - DNA, 27 bp, Artificial Sequence
  Synthetic polynucleotide encoding artificial human antibody CDR-L3 region
cagcagcgtagcaactggcctctcact

SEQ ID NO: 4193 - DNA, 36 bp, Artificial Sequence
  Synthetic polynucleotide encoding artificial human antibody CDR-L3 region
aactcccgagacagcagtgctcatgaccatctgtta

SEQ ID NO: 4194 - DNA, 30 bp, Artificial Sequence
  Synthetic polynucleotide encoding artificial human antibody CDR-L3 region
caacactttggtgactcacccttgtacatt

SEQ ID NO: 4195 - DNA, 27 bp, Artificial Sequence
  Synthetic polynucleotide encoding artificial human antibody CDR-L3 region
caggtgtgggacagcagtactgcggtg

SEQ ID NO: 4196 - DNA, 33 bp, Artificial Sequence
  Synthetic polynucleotide encoding artificial human antibody CDR-L3 region
caggtgtgggatagtagtagtgatcatgtggta

SEQ ID NO: 4197 - DNA, 33 bp, Artificial Sequence
  Synthetic polynucleotide encoding artificial human antibody CDR-L3 region
caatcagcagacagcagtggtttttatgtggta

SEQ ID NO: 4198 - DNA, 27 bp, Artificial Sequence
  Synthetic polynucleotide encoding artificial human antibody CDR-L3 region
caatcagcagacagcagtagtcccgtg

SEQ ID NO: 4199 - DNA, 30 bp, Artificial Sequence
  Synthetic polynucleotide encoding artificial human antibody CDR-L3 region
tactcaacagacagtagggctaccggggtt

SEQ ID NO: 4200 - DNA, 27 bp, Artificial Sequence
  Synthetic polynucleotide encoding artificial human antibody CDR-L3 region
caacagagttacagtacccctcagacg

SEQ ID NO: 4201 - DNA, 27 bp, Artificial Sequence
  Synthetic polynucleotide encoding artificial human antibody CDR-L3 region
caacagtatgaaaatctcccgctcact

SEQ ID NO: 4202 - DNA, 27 bp, Artificial Sequence
  Synthetic polynucleotide encoding artificial human antibody CDR-L3 region
caacagtttgataatctcccgctcact

SEQ ID NO: 4203 - DNA, 30 bp, Artificial Sequence
  Synthetic polynucleotide encoding artificial human antibody CDR-L3 region
tcctcatatgcaggcagctacacttgggtg

SEQ ID NO: 4204 - DNA, 27 bp, Artificial Sequence
  Synthetic polynucleotide encoding artificial human antibody CDR-L3 region
caggcgtgggacagcagcactgtggta

SEQ ID NO: 4205 - DNA, 33 bp, Artificial Sequence
  Synthetic polynucleotide encoding artificial human antibody CDR-L3 region
ggaacatgggatagcagcctgggtgcttatgtc

SEQ ID NO: 4206 - DNA, 24 bp, Artificial Sequence
  Synthetic polynucleotide encoding artificial human antibody CDR-L3 region
cagcagtatggtagctcactcact

SEQ ID NO: 4207 - DNA, 27 bp, Artificial Sequence
  Synthetic polynucleotide encoding artificial human antibody CDR-L3 region
cagcagtatggtagctcacctctcact

SEQ ID NO: 4208 - DNA, 30 bp, Artificial Sequence
  Synthetic polynucleotide encoding artificial human antibody CDR-L3 region
agctcatatacaagcagcaggagtctggtg

SEQ ID NO: 4209 - DNA, 27 bp, Artificial Sequence
  Synthetic polynucleotide encoding artificial human antibody CDR-L3 region
caacagacttacagcaccccgtggacg

SEQ ID NO: 4210 - DNA, 24 bp, Artificial Sequence
  Synthetic polynucleotide encoding artificial human antibody CDR-L3 region
caacaatataataattggctcact

SEQ ID NO: 4211 - DNA, 27 bp, Artificial Sequence
  Synthetic polynucleotide encoding artificial human antibody CDR-L3 region
tactctacgcctgacaacaatggggtg

SEQ ID NO: 4212 - DNA, 30 bp, Artificial Sequence
  Synthetic polynucleotide encoding artificial human antibody CDR-L3 region
agctcatatacaacctccaacagtgtggtg

SEQ ID NO: 4213 - DNA, 27 bp, Artificial Sequence
  Synthetic polynucleotide encoding artificial human antibody CDR-L3 region
cagcagtatgataactcacctctcact

SEQ ID NO: 4214 - DNA, 27 bp, Artificial Sequence
  Synthetic polynucleotide encoding artificial human antibody CDR-L3 region
cagcaatattggggtactccgtacact

SEQ ID NO: 4215 - DNA, 30 bp, Artificial Sequence
  Synthetic polynucleotide encoding artificial human antibody CDR-L3 region
cagtcctatgacagtggcctgggggtggta

SEQ ID NO: 4216 - DNA, 30 bp, Artificial Sequence
  Synthetic polynucleotide encoding artificial human antibody CDR-L3 region
agctcatatgcaggcatcaacaatttggtt

SEQ ID NO: 4217 - DNA, 27 bp, Artificial Sequence
  Synthetic polynucleotide encoding artificial human antibody CDR-L3 region
caacagtataatagttattctcagacg

SEQ ID NO: 4218 - DNA, 27 bp, Artificial Sequence
  Synthetic polynucleotide encoding artificial human antibody CDR-L3 region
cagcagtatactgactggccgtacact

SEQ ID NO: 4219 - DNA, 24 bp, Artificial Sequence
  Synthetic polynucleotide encoding artificial human antibody CDR-L3 region
cagacctggggcactgttggcgtg

SEQ ID NO: 4220 - DNA, 27 bp, Artificial Sequence
  Synthetic polynucleotide encoding artificial human antibody CDR-L3 region
cagcagtatggtagctcaccgtggacg

SEQ ID NO: 4221 - DNA, 33 bp, Artificial Sequence
  Synthetic polynucleotide encoding artificial human antibody CDR-L3 region
cagtcttatgacagcagcctgagtggttatgtc

SEQ ID NO: 4222 - DNA, 33 bp, Artificial Sequence
  Synthetic polynucleotide encoding artificial human antibody CDR-L3 region
cagtgttttgacaccagcctgactgcaaaggtg

SEQ ID NO: 4223 - DNA, 27 bp, Artificial Sequence
  Synthetic polynucleotide encoding artificial human antibody CDR-L3 region
atgcaagctctacaagttcctcggacg

SEQ ID NO: 4224 - DNA, 27 bp, Artificial Sequence
  Synthetic polynucleotide encoding artificial human antibody CDR-L3 region
caacaacttaatagttacccgctcact

SEQ ID NO: 4225 - DNA, 33 bp, Artificial Sequence
  Synthetic polynucleotide encoding artificial human antibody CDR-L3 region
gcagcatgggatgacagcctgagtggtccggtg

SEQ ID NO: 4226 - DNA, 27 bp, Artificial Sequence
  Synthetic polynucleotide encoding artificial human antibody CDR-L3 region
atgcaagctctgcaaactccgtggacg

SEQ ID NO: 4227 - DNA, 36 bp, Artificial Sequence
  Synthetic polynucleotide encoding artificial human antibody CDR-L3 region
aactcccgggacagcagtgatgaccatctggaagta

SEQ ID NO: 4228 - DNA, 27 bp, Artificial Sequence
  Synthetic polynucleotide encoding artificial human antibody CDR-L3 region
caacagtataatagttacccgaggacg

SEQ ID NO: 4229 - DNA, 27 bp, Artificial Sequence
  Synthetic polynucleotide encoding artificial human antibody CDR-L3 region
cagcaatattttactactcctcgcacg

SEQ ID NO: 4230 - DNA, 36 bp, Artificial Sequence
  Synthetic polynucleotide encoding artificial human antibody CDR-L3 region
gcagcatgggatgacggcctgggtggcctttatgtg

SEQ ID NO: 4231 - DNA, 24 bp, Artificial Sequence
  Synthetic polynucleotide encoding artificial human antibody CDR-L3 region
caacagtataatagggggtccact

SEQ ID NO: 4232 - DNA, 33 bp, Artificial Sequence
  Synthetic polynucleotide encoding artificial human antibody CDR-L3 region
caggtgtgggacaggaatagtcatcgtgtgatt

SEQ ID NO: 4233 - DNA, 33 bp, Artificial Sequence
  Synthetic polynucleotide encoding artificial human antibody CDR-L3 region
cagtcctatgacaacagtctgagtgcttgggtg

SEQ ID NO: 4234 - DNA, 33 bp, Artificial Sequence
  Synthetic polynucleotide encoding artificial human antibody CDR-L3 region
aactcccgggacagcagtggtaaccattgggtg

SEQ ID NO: 4235 - DNA, 33 bp, Artificial Sequence
  Synthetic polynucleotide encoding artificial human antibody CDR-L3 region
agctcatatataaggagcagcactcctgtggta

SEQ ID NO: 4236 - DNA, 27 bp, Artificial Sequence
  Synthetic polynucleotide encoding artificial human antibody CDR-L3 region
cagcagtattatgatactccctacact

SEQ ID NO: 4237 - DNA, 30 bp, Artificial Sequence
  Synthetic polynucleotide encoding artificial human antibody CDR-L3 region
agctcatatacaagcagcagcactctggtg

SEQ ID NO: 4238 - DNA, 24 bp, Artificial Sequence
  Synthetic polynucleotide encoding artificial human antibody CDR-L3 region
caacagtatgataatctctggacg

SEQ ID NO: 4239 - DNA, 36 bp, Artificial Sequence
  Synthetic polynucleotide encoding artificial human antibody CDR-L3 region
caggtgtgggatagtagtagtgatcatctttatgtc

SEQ ID NO: 4240 - DNA, 27 bp, Artificial Sequence
  Synthetic polynucleotide encoding artificial human antibody CDR-L3 region
caccagtatggtagctcaccaaggacg

SEQ ID NO: 4241 - DNA, 36 bp, Artificial Sequence
  Synthetic polynucleotide encoding artificial human antibody CDR-L3 region
ggaacatgggacagcagcctgactggtggttttgtc

SEQ ID NO: 4242 - DNA, 33 bp, Artificial Sequence
  Synthetic polynucleotide encoding artificial human antibody CDR-L3 region
caggtgtgggacacttctaatgatgtgggggtg

SEQ ID NO: 4243 - DNA, 27 bp, Artificial Sequence
  Synthetic polynucleotide encoding artificial human antibody CDR-L3 region
cagcagtatggtagctcacctccgact

SEQ ID NO: 4244 - DNA, 30 bp, Artificial Sequence
  Synthetic polynucleotide encoding artificial human antibody CDR-L3 region
tgctcatatgcaggtagtagcaattgggtg

SEQ ID NO: 4245 - DNA, 24 bp, Artificial Sequence
  Synthetic polynucleotide encoding artificial human antibody CDR-L3 region
atgcaaggtacacactggtccgct

SEQ ID NO: 4246 - DNA, 33 bp, Artificial Sequence
  Synthetic polynucleotide encoding artificial human antibody CDR-L3 region
gcagcatgggatgacagcctgagtggtcaggtg

SEQ ID NO: 4247 - DNA, 30 bp, Artificial Sequence
  Synthetic polynucleotide encoding artificial human antibody CDR-L3 region
aactcccgggacagcagtggtaaccatgtc

SEQ ID NO: 4248 - DNA, 24 bp, Artificial Sequence
  Synthetic polynucleotide encoding artificial human antibody CDR-L3 region
caacagagttacagtactcccacc

SEQ ID NO: 4249 - DNA, 33 bp, Artificial Sequence
  Synthetic polynucleotide encoding artificial human antibody CDR-L3 region
caggtgtgggaaagtggtggtgatcatccggtg

SEQ ID NO: 4250 - DNA, 27 bp, Artificial Sequence
  Synthetic polynucleotide encoding artificial human antibody CDR-L3 region
ctacagcataataattacccgttgacg

SEQ ID NO: 4251 - DNA, 27 bp, Artificial Sequence
  Synthetic polynucleotide encoding artificial human antibody CDR-L3 region
caacagtataatagttatccgtacact

SEQ ID NO: 4252 - DNA, 27 bp, Artificial Sequence
  Synthetic polynucleotide encoding artificial human antibody CDR-L3 region
atgcaagctctacagatcccccggacg

SEQ ID NO: 4253 - DNA, 27 bp, Artificial Sequence
  Synthetic polynucleotide encoding artificial human antibody CDR-L3 region
caggcgtgggacagcaacgtccatgtc

SEQ ID NO: 4254 - DNA, 33 bp, Artificial Sequence
  Synthetic polynucleotide encoding artificial human antibody CDR-L3 region
tactcaacagacagcagtggtaatgtctgggtg

SEQ ID NO: 4255 - DNA, 33 bp, Artificial Sequence
  Synthetic polynucleotide encoding artificial human antibody CDR-L3 region
aactcccgggacagcagtggtaacctttatgtc

SEQ ID NO: 4256 - DNA, 27 bp, Artificial Sequence
  Synthetic polynucleotide encoding artificial human antibody CDR-L3 region
cagcaatattatagtagtcctctcact

SEQ ID NO: 4257 - DNA, 30 bp, Artificial Sequence
  Synthetic polynucleotide encoding artificial human antibody CDR-L3 region
atgcaagctctacaaactcccccgtacact

SEQ ID NO: 4258 - DNA, 30 bp, Artificial Sequence
  Synthetic polynucleotide encoding artificial human antibody CDR-L3 region
agctcatatacaagcagcagcacttgggtg

SEQ ID NO: 4259 - DNA, 27 bp, Artificial Sequence
  Synthetic polynucleotide encoding artificial human antibody CDR-L3 region
cagcaaagttacagtactccgtacacc

SEQ ID NO: 4260 - DNA, 33 bp, Artificial Sequence
  Synthetic polynucleotide encoding artificial human antibody CDR-L3 region
tgctcatatgcaggtagtagcactccttgggtg

SEQ ID NO: 4261 - DNA, 33 bp, Artificial Sequence
  Synthetic polynucleotide encoding artificial human antibody CDR-L3 region
tactcaccagacagcagtggtaatgtttgggtg

SEQ ID NO: 4262 - DNA, 15 bp, Artificial Sequence
  Synthetic polynucleotide encoding artificial human antibody CDR-L3 region
cagtcccggggcact

SEQ ID NO: 4263 - DNA, 27 bp, Artificial Sequence
  Synthetic polynucleotide encoding artificial human antibody CDR-L3 region
cagcagtatggtagctcacattacact

SEQ ID NO: 4264 - DNA, 36 bp, Artificial Sequence
  Synthetic polynucleotide encoding artificial human antibody CDR-L3 region
caggtgtgggatagtagtagtgatcatccttgggtg

SEQ ID NO: 4265 - DNA, 33 bp, Artificial Sequence
  Synthetic polynucleotide encoding artificial human antibody CDR-L3 region
tgctcgtatagaagtagtacggctcccgtggtc

SEQ ID NO: 4266 - DNA, 27 bp, Artificial Sequence
  Synthetic polynucleotide encoding artificial human antibody CDR-L3 region
cagcaatattttagtactccgtggacg

SEQ ID NO: 4267 - DNA, 33 bp, Artificial Sequence
  Synthetic polynucleotide encoding artificial human antibody CDR-L3 region
caggtgtgggatggttatagtgatccattggta

SEQ ID NO: 4268 - DNA, 27 bp, Artificial Sequence
  Synthetic polynucleotide encoding artificial human antibody CDR-L3 region
caacagagttactatacccctcccact

SEQ ID NO: 4269 - DNA, 36 bp, Artificial Sequence
  Synthetic polynucleotide encoding artificial human antibody CDR-L3 region
gcagcatgggatgacagcctgaatgggctttgggtg

SEQ ID NO: 4270 - DNA, 30 bp, Artificial Sequence
  Synthetic polynucleotide encoding artificial human antibody CDR-L3 region
cagtcttctgacagcaacaatcatgtggtc

SEQ ID NO: 4271 - DNA, 33 bp, Artificial Sequence
  Synthetic polynucleotide encoding artificial human antibody CDR-L3 region
cagtcctatgacagcagcctgagtggtgtgcta

SEQ ID NO: 4272 - DNA, 27 bp, Artificial Sequence
  Synthetic polynucleotide encoding artificial human antibody CDR-L3 region
caacagagttacagtacccccttcact

SEQ ID NO: 4273 - DNA, 27 bp, Artificial Sequence
  Synthetic polynucleotide encoding artificial human antibody CDR-L3 region
caacagtatgatagtctccctctcact

SEQ ID NO: 4274 - DNA, 30 bp, Artificial Sequence
  Synthetic polynucleotide encoding artificial human antibody CDR-L3 region
cagtactatggtggctcaccgggattcact

SEQ ID NO: 4275 - DNA, 30 bp, Artificial Sequence
  Synthetic polynucleotide encoding artificial human antibody CDR-L3 region
tgctcatatgcaggtagtagcacttatgtc

SEQ ID NO: 4276 - DNA, 30 bp, Artificial Sequence
  Synthetic polynucleotide encoding artificial human antibody CDR-L3 region
caggagtatgttaaatcacctggattcgct

SEQ ID NO: 4277 - DNA, 27 bp, Artificial Sequence
  Synthetic polynucleotide encoding artificial human antibody CDR-L3 region
cagcagtatggtacttcacctcagacg

SEQ ID NO: 4278 - DNA, 30 bp, Artificial Sequence
  Synthetic polynucleotide encoding artificial human antibody CDR-L3 region
atgttgtatatgggtagtggcatttcgctc

SEQ ID NO: 4279 - DNA, 36 bp, Artificial Sequence
  Synthetic polynucleotide encoding artificial human antibody CDR-L3 region
cagtccaatgacatcagcctgagtggttctgtggta

SEQ ID NO: 4280 - DNA, 33 bp, Artificial Sequence
  Synthetic polynucleotide encoding artificial human antibody CDR-L3 region
caatcctatgacaatagcctgagtgggggggtg

SEQ ID NO: 4281 - DNA, 27 bp, Artificial Sequence
  Synthetic polynucleotide encoding artificial human antibody CDR-L3 region
cagcagtttgatatttcacccttcact

SEQ ID NO: 4282 - DNA, 30 bp, Artificial Sequence
  Synthetic polynucleotide encoding artificial human antibody CDR-L3 region
agctcatatacaagcagcagctccttggtg

SEQ ID NO: 4283 - DNA, 30 bp, Artificial Sequence
  Synthetic polynucleotide encoding artificial human antibody CDR-L3 region
tgctcatttacaggtactagcacttttgtc

SEQ ID NO: 4284 - DNA, 27 bp, Artificial Sequence
  Synthetic polynucleotide encoding artificial human antibody CDR-L3 region
cagcaatattatagtactccgtacact

SEQ ID NO: 4285 - DNA, 33 bp, Artificial Sequence
  Synthetic polynucleotide encoding artificial human antibody CDR-L3 region
gcaacatgggatgacagcctgaatggaggggtg

SEQ ID NO: 4286 - DNA, 27 bp, Artificial Sequence
  Synthetic polynucleotide encoding artificial human antibody CDR-L3 region
tggctcatctctggtggtgcccctgta

SEQ ID NO: 4287 - DNA, 33 bp, Artificial Sequence
  Synthetic polynucleotide encoding artificial human antibody CDR-L3 region
cagtcctttgacagcagcctgagtcgttctgtc

SEQ ID NO: 4288 - DNA, 27 bp, Artificial Sequence
  Synthetic polynucleotide encoding artificial human antibody CDR-L3 region
cagcagcgtaacaactggcctatcact

SEQ ID NO: 4289 - DNA, 27 bp, Artificial Sequence
  Synthetic polynucleotide encoding artificial human antibody CDR-L3 region
ctacaagattacaattaccctccgacg

SEQ ID NO: 4290 - DNA, 33 bp, Artificial Sequence
  Synthetic polynucleotide encoding artificial human antibody CDR-L3 region
aactcccgggacagcagcggtcaccattgggtg

SEQ ID NO: 4291 - DNA, 27 bp, Artificial Sequence
  Synthetic polynucleotide encoding artificial human antibody CDR-L3 region
cagcaatattattctactccatacact

SEQ ID NO: 4292 - DNA, 30 bp, Artificial Sequence
  Synthetic polynucleotide encoding artificial human antibody CDR-L3 region
atgcaaggtgcacactggcctccaatcacc

SEQ ID NO: 4293 - DNA, 30 bp, Artificial Sequence
  Synthetic polynucleotide encoding artificial human antibody CDR-L3 region
tactcaacagacactattggaaattgggtg

SEQ ID NO: 4294 - DNA, 33 bp, Artificial Sequence
  Synthetic polynucleotide encoding artificial human antibody CDR-L3 region
caggtgtgggatagtagtagtgatcattggatt

SEQ ID NO: 4295 - DNA, 27 bp, Artificial Sequence
  Synthetic polynucleotide encoding artificial human antibody CDR-L3 region
caacagagttacagtccccctctcact

SEQ ID NO: 4296 - DNA, 30 bp, Artificial Sequence
  Synthetic polynucleotide encoding artificial human antibody CDR-L3 region
cagcattatagtgactggcgagcactcact

SEQ ID NO: 4297 - DNA, 27 bp, Artificial Sequence
  Synthetic polynucleotide encoding artificial human antibody CDR-L3 region
caacaatattatggtcctctgtggacg

SEQ ID NO: 4298 - DNA, 33 bp, Artificial Sequence
  Synthetic polynucleotide encoding artificial human antibody CDR-L3 region
caatcagcagacagcagtcttacttattggctc

SEQ ID NO: 4299 - DNA, 24 bp, Artificial Sequence
  Synthetic polynucleotide encoding artificial human antibody CDR-L3 region
caacaatattccgattactccact

SEQ ID NO: 4300 - DNA, 27 bp, Artificial Sequence
  Synthetic polynucleotide encoding artificial human antibody CDR-L3 region
caccaatattatactactcctttcact

SEQ ID NO: 4301 - DNA, 27 bp, Artificial Sequence
  Synthetic polynucleotide encoding artificial human antibody CDR-L3 region
caggcgtgggacagcagcactgcagaa

SEQ ID NO: 4302 - DNA, 33 bp, Artificial Sequence
  Synthetic polynucleotide encoding artificial human antibody CDR-L3 region
gtgacatgggatgacgacctgcatggttgggtg

SEQ ID NO: 4303 - DNA, 39 bp, Artificial Sequence
  Synthetic polynucleotide encoding artificial human antibody CDR-L3 region
gcaacgtgggatagcagcctgcgtgctggccctgtagta

SEQ ID NO: 4304 - DNA, 27 bp, Artificial Sequence
  Synthetic polynucleotide encoding artificial human antibody CDR-L3 region
caacagtacaatgcttacccggtcact

SEQ ID NO: 4305 - DNA, 27 bp, Artificial Sequence
  Synthetic polynucleotide encoding artificial human antibody CDR-L3 region
caacaatattatagtactccgtggacg

SEQ ID NO: 4306 - DNA, 27 bp, Artificial Sequence
  Synthetic polynucleotide encoding artificial human antibody CDR-L3 region
cagcaatattatagtcctcctctcact

SEQ ID NO: 4307 - DNA, 30 bp, Artificial Sequence
  Synthetic polynucleotide encoding artificial human antibody CDR-L3 region
tgctcatatacaagcagcctcacttatgtc

SEQ ID NO: 4308 - DNA, 27 bp, Artificial Sequence
  Synthetic polynucleotide encoding artificial human antibody CDR-L3 region
atgcaaggtacacactggccgtacact

SEQ ID NO: 4309 - DNA, 27 bp, Artificial Sequence
  Synthetic polynucleotide encoding artificial human antibody CDR-L3 region
caggcgtgggacagcagcacttatgtc

SEQ ID NO: 4310 - DNA, 30 bp, Artificial Sequence
  Synthetic polynucleotide encoding artificial human antibody CDR-L3 region
cagcagtatggtggctcacctctattcact

SEQ ID NO: 4311 - DNA, 27 bp, Artificial Sequence
  Synthetic polynucleotide encoding artificial human antibody CDR-L3 region
cagacgtgggacagcagcactgtgata

SEQ ID NO: 4312 - DNA, 27 bp, Artificial Sequence
  Synthetic polynucleotide encoding artificial human antibody CDR-L3 region
atgcaagctctacaaactccgtacact

SEQ ID NO: 4313 - DNA, 33 bp, Artificial Sequence
  Synthetic polynucleotide encoding artificial human antibody CDR-L3 region
ggaacatgggatagcagtctgagtgctggcgtc

SEQ ID NO: 4314 - DNA, 24 bp, Artificial Sequence
  Synthetic polynucleotide encoding artificial human antibody CDR-L3 region
caacagtataatagttattggacg

SEQ ID NO: 4315 - DNA, 27 bp, Artificial Sequence
  Synthetic polynucleotide encoding artificial human antibody CDR-L3 region
caacagtataatagttatccgtggacg

SEQ ID NO: 4316 - DNA, 36 bp, Artificial Sequence
  Synthetic polynucleotide encoding artificial human antibody CDR-L3 region
cagtcctatgacagcagcctgagtggttcaggggtg

SEQ ID NO: 4317 - DNA, 30 bp, Artificial Sequence
  Synthetic polynucleotide encoding artificial human antibody CDR-L3 region
caatcagcagacagcagtggtacttatgtc

SEQ ID NO: 4318 - DNA, 27 bp, Artificial Sequence
  Synthetic polynucleotide encoding artificial human antibody CDR-L3 region
caacaggctcacggtttcccaatcact

SEQ ID NO: 4319 - DNA, 24 bp, Artificial Sequence
  Synthetic polynucleotide encoding artificial human antibody CDR-L3 region
cagcagtataatagctggcccgct

SEQ ID NO: 4320 - DNA, 27 bp, Artificial Sequence
  Synthetic polynucleotide encoding artificial human antibody CDR-L3 region
caacagagttacaataccccgtacact

SEQ ID NO: 4321 - DNA, 27 bp, Artificial Sequence
  Synthetic polynucleotide encoding artificial human antibody CDR-L3 region
caacagagttacaataccccgctcact

SEQ ID NO: 4322 - DNA, 30 bp, Artificial Sequence
  Synthetic polynucleotide encoding artificial human antibody CDR-L3 region
cagcagtatggtagctcacctccgaacagt

SEQ ID NO: 4323 - DNA, 33 bp, Artificial Sequence
  Synthetic polynucleotide encoding artificial human antibody CDR-L3 region
caggtgtgggatagtagtagtgatcatccggta

SEQ ID NO: 4324 - DNA, 30 bp, Artificial Sequence
  Synthetic polynucleotide encoding artificial human antibody CDR-L3 region
cagtcttatgatagcaacactcattgggtg

SEQ ID NO: 4325 - DNA, 27 bp, Artificial Sequence
  Synthetic polynucleotide encoding artificial human antibody CDR-L3 region
atgcaagctctagaaactcctcgcact

SEQ ID NO: 4326 - DNA, 24 bp, Artificial Sequence
  Synthetic polynucleotide encoding artificial human antibody CDR-L3 region
caacagtataatagttattcgacg

SEQ ID NO: 4327 - DNA, 27 bp, Artificial Sequence
  Synthetic polynucleotide encoding artificial human antibody CDR-L3 region
atgcaagctctacaacctccgtacact

SEQ ID NO: 4328 - DNA, 30 bp, Artificial Sequence
  Synthetic polynucleotide encoding artificial human antibody CDR-L3 region
caacagagttacagtacccctccgtggacg

SEQ ID NO: 4329 - DNA, 27 bp, Artificial Sequence
  Synthetic polynucleotide encoding artificial human antibody CDR-L3 region
cagcaatattatcttgttcccgtcacc

SEQ ID NO: 4330 - DNA, 36 bp, Artificial Sequence
  Synthetic polynucleotide encoding artificial human antibody CDR-L3 region
gcagcatgggatgacagcctgagtggcccttatgtc

SEQ ID NO: 4331 - DNA, 33 bp, Artificial Sequence
  Synthetic polynucleotide encoding artificial human antibody CDR-L3 region
agctcatatgcaggcagcaacaatttttatgtc

SEQ ID NO: 4332 - DNA, 36 bp, Artificial Sequence
  Synthetic polynucleotide encoding artificial human antibody CDR-L3 region
cagtcctatgacagcagcctgagtggttcaatgata

SEQ ID NO: 4333 - DNA, 24 bp, Artificial Sequence
  Synthetic polynucleotide encoding artificial human antibody CDR-L3 region
atgatttggtcaagccttgtggta

SEQ ID NO: 4334 - DNA, 27 bp, Artificial Sequence
  Synthetic polynucleotide encoding artificial human antibody CDR-L3 region
atgcaagctctacaaactccgtggacg

SEQ ID NO: 4335 - DNA, 27 bp, Artificial Sequence
  Synthetic polynucleotide encoding artificial human antibody CDR-L3 region
ctacaaaattacaattacccttggacg

SEQ ID NO: 4336 - DNA, 27 bp, Artificial Sequence
  Synthetic polynucleotide encoding artificial human antibody CDR-L3 region
atgcaaggtatacaccttcctaggact

SEQ ID NO: 4337 - protein, 263 aa, Homo sapiens
  RSPO1 (NCBI Accession: NP_001229837)
MRLGLCVVALVLSWTHLTISSRGIKGKRQRRISAEGSQACAKGCELCSEVNGCLKCSPKLFILLERNDIRQVGVCLPSCPPGYFDARNPDMNKCIKCKIEHCEACFSHNFCTKCKEGLYLHKGRCYPACPEGSSAANGTMECSSPAQCEMSEWSPWGPCSKKQQLCGFRRGSEERTRRVLHAPVGDHAACSDTKETRRCTVRRVPCPEGQKRRKGGQGRRENANRNLARKESKEAGAGSRRRKGQQQQQQQGTVGPLTSAGPA

SEQ ID NO: 4338 - protein, 485 aa, Homo sapiens
  ZDHHC1 (NCBI Accession: NP_037436)
MYKMNICNKPSNKTAPEKSVWTAPAQPSGPSPELQGQRSRRNGWSWPPHPLQIVAWLLYLFFAVIGFGILVPLLPHHWVPAGYACMGAIFAGHLVVHLTAVSIDPADANVRDKSYAGPLPIFNRSQHAHVIEDLHCNLCNVDVSARSKHCSACNKCVCGFDHHCKWLNNCVGERNYRLFLHSVASALLGVLLLVLVATYVFVEFFVNPMRLRTNRHFEVLKNHTDVWFVFLPAAPVETQAPAILALAALLILLGLLSTALLGHLLCFHIYLMWHKLTTYEYIVQHRPPQEAKGVHRELESCPPKMRPIQEMEFYMRTFRHMRPEPPGQAGPAAVNAKHSRPASPDPTPGRRDCAGPPVQVEWDRKKPLPWRSPLLLLAMWGPQAPPCLCRKRGRGACIKCERLRPRIRRRGLGPPAAAPARRRIPRTPALCTPLALPAPTTRRRQSPWTRFQWRRRAWAAPLWPPRGAGADSPRWRGRRVRPPFS

SEQ ID NO: 4339 - protein, 462 aa, Homo sapiens
  RXRA (NCBI Accession: NP_002948)
MDTKHFLPLDFSTQVNSSLTSPTGRGSMAAPSLHPSLGPGIGSPGQLHSPISTLSSPINGMGPPFSVISSPMGPHSMSVPTTPTLGFSTGSPQLSSPMNPVSSSEDIKPPLGLNGVLKVPAHPSGNMASFTKHICAICGDRSSGKHYGVYSCEGCKGFFKRTVRKDLTYTCRDNKDCLIDKRQRNRCQYCRYQKCLAMGMKREAVQEERQRGKDRNENEVESTSSANEDMPVERILEAELAVEPKTETYVEANMGLNPSSPNDPVTNICQAADKQLFTLVEWAKRIPHFSELPLDDQVILLRAGWNELLIASFSHRSIAVKDGILLATGLHVHRNSAHSAGVGAIFDRVLTELVSKMRDMQMDKTELGCLRAIVLFNPDSKGLSNPAEVEALREKVYASLEAYCKHKYPEQPGRFAKLLLRLPALRSIGLKCLEHLFFFKLIGDTPIDTFLMEMLEAPHQMT

SEQ ID NO: 4340 - protein, 463 aa, Homo sapiens
  RXRG (NCBI Accession: NP_008848)
MYGNYSHFMKFPAGYGGSPGHTGSTSMSPSAALSTGKPMDSHPSYTDTPVSAPRTLSAVGTPLNALGSPYRVITSAMGPPSGALAAPPGINLVAPPSSQLNVVNSVSSSEDIKPLPGLPGIGNMNYPSTSPGSLVKHICAICGDRSSGKHYGVYSCEGCKGFFKRTIRKDLIYTCRDNKDCLIDKRQRNRCQYCRYQKCLVMGMKREAVQEERQRSRERAESEAECATSGHEDMPVERILEAELAVEPKTESYGDMNMENSTNDPVTNICHAADKQLFTLVEWAKRIPHFSDLTLEDQVILLRAGWNELLIASFSHRSVSVQDGILLATGLHVHRSSAHSAGVGSIFDRVLTELVSKMKDMQMDKSELGCLRAIVLFNPDAKGLSNPSEVETLREKVYATLEAYTKQKYPEQPGRFAKLLLRLPALRSIGLKCLEHLFFFKLIGDTPIDTFLMEMLETPLQIT

SEQ ID NO: 4341 - protein, 183 aa, Homo sapiens
  TMEM154 (NCBI Accession: NP_689893)
MQAPRAALVFALVIALVPVGRGNYEELENSGDTTVESERPNKVTIPSTFAAVTIKETLNANINSTNFAPDENQLEFILMVLIPLILLVLLLLFVVFLATYYKRKRTKQEPSSQGSQSALQTYELGSENVKVPIFEEDTPSVMEIEMEELDKWMNSMNRNADFECLPTLKEEKESNHNPSDSES

SEQ ID NO: 4342 - protein, 136 aa, Homo sapiens
  SNAPIN (NCBI Accession: NP_036569)
MAGAGSAAVSGAGTPVAGPTGRDLFAEGLLEFLRPAVQQLDSHVHAVRESQVELREQIDNLATELCRINEDQKVALDLDPYVKKLLNARRRVVLVNNILQNAQERLRRLNHSVAKETARRRAMLDSGIYPPGSPGK

SEQ ID NO: 4343 - protein, 847 aa, Homo sapiens
  PYGL (NCBI Accession: NP_002854)
MAKPLTDQEKRRQISIRGIVGVENVAELKKSFNRHLHFTLVKDRNVATTRDYYFALAHTVRDHLVGRWIRTQQHYYDKCPKRVYYLSLEFYMGRTLQNTMINLGLQNACDEAIYQLGLDIEELEEIEEDAGLGNGGLGRLAACFLDSMATLGLAAYGYGIRYEYGIFNQKIRDGWQVEEADDWLRYGNPWEKSRPEFMLPVHFYGKVEHTNTGTKWIDTQVVLALPYDTPVPGYMNNTVNTMRLWSARAPNDFNLRDFNVGDYIQAVLDRNLAENISRVLYPNDNFFEGKELRLKQEYFVVAATLQDIIRRFKASKFGSTRGAGTVFDAFPDQVAIQLNDTHPALAIPELMRIFVDIEKLPWSKAWELTQKTFAYTNHTVLPEALERWPVDLVEKLLPRHLEIIYEINQKHLDRIVALFPKDVDRLRRMSLIEEEGSKRINMAHLCIVGSHAVNGVAKIHSDIVKTKVFKDFSELEPDKFQNKTNGITPRRWLLLCNPGLAELIAEKIGEDYVKDLSQLTKLHSFLGDDVFLRELAKVKQENKLKFSQFLETEYKVKINPSSMFDVQVKRIHEYKRQLLNCLHVITMYNRIKKDPKKLFVPRTVIIGGKAAPGYHMAKMIIKLITSVADVVNNDPMVGSKLKVIFLENYRVSLAEKVIPATDLSEQISTAGTEASGTGNMKFMLNGALTIGTMDGANVEMAEEAGEENLFIFGMRIDDVAALDKKGYEAKEYYEALPELKLVIDQIDNGFFSPKQPDLFKDIINMLFYHDRFKVFADYEAYVKCQDKVSQLYMNPKAWNTMVLKNIAASGKFSSDRTIKEYAQNIWNVEPSDLKISLSNESNKVNGN

SEQ ID NO: 4344 - protein, 328 aa, Homo sapiens
  RCN3 (NCBI Accession: NP_065701)
MMWRPSVLLLLLLLRHGAQGKPSPDAGPHGQGRVHQAAPLSDAPHDDAHGNFQYDHEAFLGREVAKEFDQLTPEESQARLGRIVDRMDRAGDGDGWVSLAELRAWIAHTQQRHIRDSVSAAWDTYDTDRDGRVGWEELRNATYGHYAPGEEFHDVEDAETYKKMLARDERRFRVADQDGDSMATREELTAFLHPEEFPHMRDIVIAETLEDLDRNKDGYVQVEEYIADLYSAEPGEEEPAWVQTERQQFRDFRDLNKDGHLDGSEVGHWVLPPAQDQPLVEANHLLHESDTDKDGRLSKAEILGNWNMFVGSQATNYGEDLTRHHDEL

SEQ ID NO: 4345 - protein, 421 aa, Homo sapiens
  SYT12 (NCBI Accession: XP_011543649)
MAVDVAEYHLSVIKSPPGWEVGVYAAGALALLGIAAVSLWKLWTSGSFPSPSPFPNYDYRYLQQKYGESCAEAREKRVPAWNAQRASTRGPPSRKGSLSIEDTFESISELGPLELMGRELDLAPYGTLRKSQSADSLNSISSVSNTFGQDFTLGQVEVSMEYDTASHTLNVAVMQGKDLLEREEASFESCFMRVSLLPDEQIVGISRIQRNAYSIFFDEKFSIPLDPTALEEKSLRFSVFGIDEDERNVSTGVVELKLSVLDLPLQPFSGWLYLQDQNKAADAVGEILLSLSYLPTAERLTVVVVKAKNLIWTNDKTTADPFVKVYLLQDGRKMSKKKTAVKRDDPNPVFNEAMIFSVPAIVLQDLSLRVTVAESSSDGRGDNVGHVIIGPSASGMGTTHWNQMLATLRRPVSMWHAVRRN

SEQ ID NO: 4346 - protein, 390 aa, Homo sapiens
  Nr2f6 (NCBI Accession: NP_005225)
MAMVTGGWGDPGGDTNGVDKAGGSYPRATEDDSASPPGATSDAEPGDEERPGLQVDCVVCGDKSSGKHYGVFTCEGCKSFFKRSIRRNLSYTCRSNRDCQIDQHHRNQCQYCRLKKCFRVGMRKEAVQRGRIPHALPGPAACSPPGATGVEPFTGPPVSELIAQLLRAEPYPAAGRFGGGGAVLGIDNVCELAARLLFSTVEWARHAPFFPELPAADQVALLRLSWSELFVLNAAQAALPLHTAPLLAAAGLHAAPMAAERAVAFMDQVRAFQEQVDKLGRLQVDAAEYGCLKAIALFTPDACGLSDPAHVESLQEKAQVALTEYVRAQYPSQPQRFGRLLLRLPALRAVPASLISQLFFMRLVGKTPIETLIRDMLLSGSTFNWPYGSG

SEQ ID NO: 4347 - protein, 828 aa, Homo sapiens
  PPP1R13L (NCBI Accession: NP_006654)
MDSEAFQSARDFLDMNFQSLAMKHMDLKQMELDTAAAKVDELTKQLESLWSDSPAPPGPQAGPPSRPPRYSSSSIPEPFGSRGSPRKAATDGADTPFGRSESAPTLHPYSPLSPKGRPSSPRTPLYLQPDAYGSLDRATSPRPRAFDGAGSSLGRAPSPRPGPGPLRQQGPPTPFDFLGRAGSPRGSPLAEGPQAFFSERGPSPRPPATAYDAPASAFGSSLLGSGGSAFAPPLRAQDDLTLRRRPPKAWNESDLDVAYEKKPSQTASYERLDVFARPASPSLQLLPWRESSLDGLGGTGKDNLTSATLPRNYKVSPLASDRRSDAGSYRRSLGSAGPSGTLPRSWQPVSRIPMPPSSPQPRGAPRQRPIPLSMIFKLQNAFWEHGASRAMLPGSPLFTRAPPPKLQPQPQPQPQPQSQPQPQLPPQPQTQPQTPTPAPQHPQQTWPPVNEGPPKPPTELEPEPEIEGLLTPVLEAGDVDEGPVARPLSPTRLQPALPPEAQSVPELEEVARVLAEIPRPLKRRGSMEQAPAVALPPTHKKQYQQIISRLFHRHGGPGPGGPEPELSPITEGSEARAGPPAPAPPAPIPPPAPSQSSPPEQPQSMEMRSVLRKAGSPRKARRARLNPLVLLLDAALTGELEVVQQAVKEMNDPSQPNEEGITALHNAICGANYSIVDFLITAGANVNSPDSHGWTPLHCAASCNDTVICMALVQHGAAIFATTLSDGATAFEKCDPYREGYADCATYLADVEQSMGLMNSGAVYALWDYSAEFGDELSFREGESVTVLRRDGPEETDWWWAALHGQEGYVPRNYFGLFPRVKPQRSKV

SEQ ID NO: 4348 - protein, 317 aa, Homo sapiens
  OR6Q1 (NCBI Accession: NP_001005186)
MQPYTKNWTQVTEFVMMGFAGIHEAHLLFFILFLTMYLFTLVENLAIILVVGLDHRLRRPMYFFLTHLSCLEIWYTSVTVPKMLAGFIGVDGGKNISYADCLSQLFIFTFLGATECFLLAAMAYDRYVAICMPLHYGAFVSWGTCIRLAAACWLVGFLTPILPIYLLSQLTFYGPNVIDHFSCDASPLLALSCSDVTWKETVDFLVSLAVLLASSMVIAVSYGNIVWTLLHIRSAAERWKAFSTCAAHLTVVSLFYGTLFFMYVQTKVTSSINFNKVVSVFYSVVTPMLNPLIYSLRNKEVKGALGRVFSLNFWKGQ

SEQ ID NO: 4349 - protein, 180 aa, Homo sapiens
  CTAG1A (NCBI Accession: NP_640343)
MQAEGRGTGGSTGDADGPGGPGIPDGPGGNAGGPGEAGATGGRGPRGAGAARASGPGGGAPRGPHGGAASGLNGCCRCGARGPESRLLEFYLAMPFATPMEAELARRSLAQDAPPLPVPGVLLKEFTVSGNILTIRLTAADHRQLQLSISSCLQQLSLLMWITQCFLPVFLAQPPSGQRR

SEQ ID NO: 4350 - protein, 365 aa, Homo sapiens
  HTR1E (NCBI Accession: NP_000856)
MNITNCTTEASMAIRPKTITEKMLICMTLVVITTLTTLLNLAVIMAIGTTKKLHQPANYLICSLAVTDLLVAVLVMPLSIIYIVMDRWKLGYFLCEVWLSVDMTCCTCSILHLCVIALDRYWAITNAIEYARKRTAKRAALMILTVWTISIFISMPPLFWRSHRRLSPPPSQCTIQHDHVIYTIYSTLGAFYIPLTLILILYYRIYHAAKSLYQKRGSSRHLSNRSTDSQNSFASCKLTQTFCVSDFSTSDPTTEFEKFHASIRIPPFDNDLDHPGERQQISSTRERKAARILGLILGAFILSWLPFFIKELIVGLSIYTVSSEVADFLTWLGYVNSLINPLLYTSFNEDFKLAFKKLIRCREHT

SEQ ID NO: 4351 - protein, 362 aa, Homo sapiens
  MFAP3 (NCBI Accession: NP_001229265)
MKLHCCLFTLVASIIVPAAFVLEDVDFDQMVSLEANRSSYNASFPSSFELSASSHSDDDVIIAKEGTSVSIECLLTASHYEDVHWHNSKGQQLDGRSRGGKWLVSDNFLNITNVAFDDRGLYTCFVTSPIRASYSVTLRVIFTSGDMSVYYMIVCLIAFTITLILNVTRLCMMSSHLRKTEKAINEFFRTEGAEKLQKAFEIAKRIPIITSAKTLELAKVTQFKTMEFARYIEELARSVPLPPLILNCRAFVEEMFEAVRVDDPDDLGERIKERPALNAQGGIYVINPEMGRSNSPGGDSDDGSLNEQGQEIAVQVSVHLQSETKSIDTESQGSSHFSPPDDIGSAESNCNYKDGAYENCQL

SEQ ID NO: 4352 - protein, 308 aa, Homo sapiens
  HABP4 (NCBI Accession: NP_055097)
MKGALGSPVAAAGAAMQESFGCVVANRFHQLLDDESDPFDILREAERRRQQQLQRKRRDEAAAAAGAGPRGGRSPAGASGHRAGAGGRRESQKERKSLPAPVAQRPDSPGGGLQAPGQKRTPRRGEQQGWNDSRGPEGMLERAERRSYREYRPYETERQADFTAEKFPDEKVPELEVEEETQVQEMTLDEWKNLQEQTRPKPEFNIRKPESTVPSKAVVIHKSKYRDDMVKDDYEDDSHVFRKPANDITSQLEINFGNLPRPGRGARGGTRGGRGRIRRAENYGPRAEVVMQDVAPNPDDPEDFPALS

SEQ ID NO: 4353 - protein, 141 aa, Homo sapiens
  BC025996.2_frag (NCBI Accession: NR_003675)
MDIPVPSSFNDVGQDWRLRHFVDQMWYEREVTFLEQWTQDLHTRVVLRIVSAHSYAIVWVNGVDALEHEGSTSPLTPTSVACSRWGPCPPASASLSPSATCSSPPPCHQGASSTWPTPPRGYHPASTADTHLRVPPRGALH

SEQ ID NO: 4354 - protein, 340 aa, Homo sapiens
  DUSP12 (NCBI Accession: NP_009171)
MLEAPGPSDGCELSNPSASRVSCAGQMLEVQPGLYFGGAAAVAEPDHLREAGITAVLTVDSEEPSFKAGPGVEDLWRLFVPALDKPETDLLSHLDRCVAFIGQARAEGRAVLVHCHAGVSRSVAIITAFLMKTDQLPFEKAYEKLQILKPEAKMNEGFEWQLKLYQAMGYEVDTSSAIYKQYRLQKVTEKYPELQNLPQELFAVDPTTVSQGLKDEVLYKCRKCRRSLFRSSSILDHREGSGPIAFAHKRMTPSSMLTTGRQAQCTSYFIEPVQWMESALLGVMDGQLLCPKCSAKLGSFNWYGEQCSCGRWITPAFQIHKNRVDEMKILPVLGSQTGKI

SEQ ID NO: 4355 - protein, 892 aa, Homo sapiens
  ACTN1 (NCBI Accession: NP_001093)
MDHYDSQQTNDYMQPEEDWDRDLLLDPAWEKQQRKTFTAWCNSHLRKAGTQIENIEEDFRDGLKLMLLLEVISGERLAKPERGKMRVHKISNVNKALDFIASKGVKLVSIGAEEIVDGNVKMTLGMIWTIILRFAIQDISVEETSAKEGLLLWCQRKTAPYKNVNIQNFHISWKDGLGFCALIHRHRPELIDYGKLRKDDPLTNLNTAFDVAEKYLDIPKMLDAEDIVGTARPDEKAIMTYVSSFYHAFSGAQKAETAANRICKVLAVNQENEQLMEDYEKLASDLLEWIRRTIPWLENRVPENTMHAMQQKLEDFRDYRRLHKPPKVQEKCQLEINFNTLQTKLRLSNRPAFMPSEGRMVSDINNAWGCLEQVEKGYEEWLLNEIRRLERLDHLAEKFRQKASIHEAWTDGKEAMLRQKDYETATLSEIKALLKKHEAFESDLAAHQDRVEQIAAIAQELNELDYYDSPSVNARCQKICDQWDNLGALTQKRREALERTEKLLETIDQLYLEYAKRAAPFNNWMEGAMEDLQDTFIVHTIEEIQGLTTAHEQFKATLPDADKERLAILGIHNEVSKIVQTYHVNMAGTNPYTTITPQEINGKWDHVRQLVPRRDQALTEEHARQQHNERLRKQFGAQANVIGPWIQTKMEEIGRISIEMHGTLEDQLSHLRQYEKSIVNYKPKIDQLEGDHQLIQEALIFDNKHTNYTMEHIRVGWEQLLTTIARTINEVENQILTRDAKGISQEQMNEFRASFNHFDRDHSGTLGPEEFKACLISLGYDIGNDPQGEAEFARIMSIVDPNRLGVVTFQAFIDFMSRETADTDTADQVMASFKILAGDKNYITMDELRRELPPDQAEYCIARMAPYTGPDSVPGALDYMSFSTALYGESDL

SEQ ID NO: 4356 - protein, 545 aa, Homo sapiens
  ZKSCAN4 (NCBI Accession: XP_005249152)
MAREPRKNAALDAQSAEDQTGLLTVKVEKEEASALTAEVRAPCSPARGPERSRQRFRGFRYPEAAGPREALSRLRELCGQWLQPEMHSKEQILELLVLEQFLTILPGNLQSWVREQHPESGEEVVVLLEYLERQLDEPAPQVPVGDQGQELLCCKMALLTQTQGSQSSQCQPMKALFKHESLGSQPLHDRVLQVPGLAQGGCCREDAMVASRLTPGSQGLLKMEDVALTLTPGWTQLDSSQVNLYRDEKQENHSSLVSLGGEIQTKSRDLPPVKKLPEKEHGKICHLREDIAQIPTHAEAGEQEGRLQRKQKNAIGSRRHYCHECGKSFAQSSGLTKHRRIHTGEKPYECEDCGKTFIGSSALVIHQRVHTGEKPYECEECGKVFSHSSNLIKHQRTHTGEKPYECDDCGKTFSQSCSLLEHHKIHTGEKPYQCNMCGKAFRRNSHLLRHQRIHGDKNVQNPEHGESWESQGRTESQWENTEAPVSYKCNECERSFTRNRSLIEHQKIHTGEKPYQCDTCGKGFTRTSYLVQHQRSHVGKKTLSQ

SEQ ID NO: 4357 - protein, 448 aa, Homo sapiens
  PNMA5 (NCBI Accession: NP_001096620)
MALTLLEDWCKGMDMDPRKALLIVGIPMECSEVEIQDTVKAGLQPLCAYRVLGRMFRREDNAKAVFIELADTVNYTTLPSHIPGKGGSWEVVVKPRNPDDEFLSRLNYFLKDEGRSMTDVARALGCCSLPAESLDAEVMPQVRSPPLEPPKESMWYRKLKVFSGTASPSPGEETFEDWLEQVTEIMPIWQVSEVEKRRRLLESLRGPALSIMRVLQANNDSITVEQCLDALKQIFGDKEDFGASQFRFLQTSPKIGEKVSTFLLRLEPLLQKAVHKSPLSVRSTDMIRLKHLLARVAMTPALRGKLELLDQRGCPPNFLELMKLIRDEEEWENTEAVMKNKEKPSGRGRGASGRQARAEASVSAPQATVQARSFSDSSPQTIQGGLPPLVKRRRLLGSESTRGEDHGQATYPKAENQTPGREGPQAAGEELGNEAGAGAMSHPKPWET

SEQ ID NO: 4358 - protein, 621 aa, Homo sapiens [sequence omitted]

SEQ ID NO: 4359 - protein, 552 aa, Homo sapiens
  MPP2 (NCBI Accession: NP_005365)
MPVAATNSETAMQQVLDNLGSLPSATGAAELDLIFLRGIMESPIVRSLAKAHERLEETKLEAVRDNNLELVQEILRDLAQLAEQSSTAAELAHILQEPHFQSLLETHDSVASKTYETPPPSPGLDPTFSNQPVPPDAVRMVGIRKTAGEHLGVTFRVEGGELVIARILHGGMVAQQGLLHVGDIIKEVNGQPVGSDPRALQELLRNASGSVILKILPSYQEPHLPRQVFVKCHFDYDPARDSLIPCKEAGLRFNAGDLLQIVNQDDANWWQACHVEGGSAGLIPSQLLEEKRKAFVKRDLELTPNSGTLCGSLSGKKKKRMMYLTTKNAEFDRHELLIYEEVARMPPFRRKTLVLIGAQGVGRRSLKNKLIMWDPDRYGTTVPYTSRRPKDSEREGQGYSFVSRGEMEADVRAGRYLEHGEYEGNLYGTRIDSIRGVVAAGKVCVLDVNPQAVKVLRTAEFVPYVVFIEAPDFETLRAMNRAALESGISTKQLTEADLRRTVEESSRIQRGYGHYFDLCLVNSNLERTFRELQTAMEKLRTEPQWVPVSWVY

SEQ ID NO: 4360 - protein, 526 aa, Homo sapiens
  BTN1A1 (NCBI Accession: NP_001723)
MAVFPSSGLPRCLLTLILLQLPKLDSAPFDVIGPPEPILAVVGEDAELPCRLSPNASAEHLELRWFRKKVSPAVLVHRDGREQEAEQMPEYRGRATLVQDGIAKGRVALRIRGVRVSDDGEYTCFFREDGSYEEALVHLKVAALGSDPHISMQVQENGEICLECTSVGWYPEPQVQWRTSKGEKFPSTSESRNPDEEGLFTVAASVIIRDTSAKNVSCYIQNLLLGQEKKVEISIPASSLPRLTPWIVAVAVILMVLGLLTIGSIFFTWRLYNERPRERRNEFSSKERLLEELKWKKATLHAVDVTLDPDTAHPHLFLYEDSKSVRLEDSRQKLPEKTERFDSWPCVLGRETFTSGRHYWEVEVGDRTDWAIGVCRENVMKKGFDPMTPENGFWAVELYGNGYWALTPLRTPLPLAGPPRRVGIFLDYESGDISFYNMNDGSDIYTFSNVTFSGPLRPFFCLWSSGKKPLTICPIADGPERVTVIANAQDLSKEIPLSPMGEDSAPRDADTLHSKLIPTQPSQGAP

SEQ ID NO: 4361 - protein, 241 aa, Homo sapiens
  PEX11G (NCBI Accession: NP_542393)
MASLSGLASALESYRGRDRLIRVLGYCCQLVGGVLVEQCPARSEVGTRLLVVSTQLSHCRTILRLFDDLAMFVYTKQYGLGAQEEDAFVRCVSVLGNLADQLYYPCEHVAWAADARVLHVDSSRWWTLSTTLWALSLLLGVARSLWMLLKLRQRLRSPTAPFTSPLPRGKRRAMEAQMQSEALSLLSNLADLANAVHWLPRGVLWAGRFPPWLVGLMGTISSILSMYQAARAGGQAEATTP

SEQ ID NO: 4362 - protein, 575 aa, Homo sapiens
  ZNF8 (NCBI Accession: NP_066575)
MDPEDEGVAGVMSVGPPAARLQEPVTFRDVAVDFTQEEWGQLDPTQRILYRDVMLETFGHLLSIGPELPKPEVISQLEQGTELWVAERGTTQGCHPAWEPRSESQASRKEEGLPEEEPSHVTGREGFPTDAPYPTTLGKDRECQSQSLALKEQNNLKQLEFGLKEAPVQDQGYKTLRLRENCVLSSSPNPFPEISRGEYLYTYDSQITDSEHNSSLVSQQTGSPGKQPGENSDCHRDSSQAIPITELTKSQVQDKPYKCTDCGKSFNHNAHLTVHKRIHTGERPYMCKECGKAFSQNSSLVQHERIHTGDKPYKCAECGKSFCHSTHLTVHRRIHTGEKPYECQDCGRAFNQNSSLGRHKRTHTGEKPYTCSVCGKSFSRTTCLFLHLRTHTEERPYECNHCGKGFRHSSSLAQHQRKHAGEKPFECRQRLIFEQTPALTKHEWTEALGCDPPLSQDERTHRSDRPFKCNQCGKCFIQSSHLIRHQITHTREEQPHGRSRRREQSSSRNSHLVQHQHPNSRKSSAGGAKAGQPESRALALFDIQKIMQEKNPVHVIGVEEPSVGASMLFDIREST

SEQ ID NO: 4363 - protein, 733 aa, Homo sapiens
  SATB2 (NCBI Accession: NP_056080)
MERRSESPCLRDSPDRRSGSPDVKGPPPVKVARLEQNGSPMGARGRPNGAVAKAVGGLMIPVFCVVEQLDGSLEYDNREEHAEFVLVRKDVLFSQLVETALLALGYSHSSAAQAQGIIKLGRWNPLPLSYVTDAPDATVADMLQDVYHVVTLKIQLQSCSKLEDLPAEQWNHATVRNALKELLKEMNQSTLAKECPLSQSMISSIVNSTYYANVSATKCQEFGRWYKKYKKIKVERVERENLSDYCVLGQRPMHLPNMNQLASLGKTNEQSPHSQIHHSTPIRNQVPALQPIMSPGLLSPQLSPQLVRQQIAMAHLINQQIAVSRLLAHQHPQAINQQFLNHPPIPRAVKPEPTNSSVEVSPDIYQQVRDELKRASVSQAVFARVAFNRTQGLLSEILRKEEDPRTASQSLLVNLRAMQNFLNLPEVERDRIYQDERERSMNPNVSMVSSASSSPSSSRTPQAKTSTPTTDLPIKVDGANINITAAIYDEIQQEMKRAKVSQALFAKVAANKSQGWLCELLRWKENPSPENRTLWENLCTIRRFLNLPQHERDVIYEEESRHHHSERMQHVVQLPPEPVQVLHRQQSQPAKESSPPREEAPPPPPPTEDSCAKKPRSRTKISLEALGILQSFIHDVGLYPDQEAIHTLSAQLDLPKHTIIKFFQNQRYHVKHHGKLKEHLGSAVDVAEYKDEELLTESEENDSEEGSEEMYKVEAEEENADKSKAAPAEIDQR

SEQ ID NO: 4364 - protein, 290 aa, Homo sapiens
  GDAP1 (NCBI Accession: NP_001035808)
MRLNSTGEVPVLIHGENIICEATQIIDYLEQTFLDERTPRLMPDKESMYYPRVQHYRELLDSLPMDAYTHGCILHPELTVDSMIPAYATTRIRSQIGNTESELKKLAEENPDLQEAYIAKQKRLKSKLLDHDNVKYLKKILDELEKVLDQVETELQRRNEETPEEGQQPWLCGESFTLADVSLAVTLHRLKFLGFARRNWGNGKRPNLETYYERVLKRKTFNKVLGHVNNILISAVLPTAFRVAKKRAPKVLGTTLVVGLLAGVGYFAFMLFRKRLGSMILAFRPRPNYF

SEQ ID NO: 4365 - protein, 734 aa, Homo sapiens
  CTNNAL1 (NCBI Accession: NP_003789)
MAASPGPAGVGGAGAVYGSGSSGFALDSGLEIKTRSVEQTLLPLVSQITTLINHKDNTKKSDKTLQAIQRVGQAVNLAVGRFVKVGEAIANENWDLKEEINIACIEAKQAGETIAALTDITNLNHLESDGQITIFTDKTGVIKAARLLLSSVTKVLLLADRVVIKQIITSRNKVLATMERLEKVNSFQEFVQIFSQFGNEMVEFAHLSGDRQNDLKDEKKKAKMAAARAVLEKCTMMLLTASKTCLRHPNCESAHKNKEGVFDRMKVALDKVIEIVTDCKPNGETDISSISIFTGIKEFKMNIEALRENLYFQSKENLSVTLEVILERMEDFTDSAYTSHEHRERILELSTQARMELQQLISVWIQAQSKKTKSIAEELELSILKISHSLNELKKELHSTATQLAADLLKYHADHVVLKALKLTGVEGNLEALAEYACKLSEQKEQLVETCRLLRHISGTEPLEITCIHAEETFQVTGQQIISAAETLTLHPSSKIAKENLDVFCEAWESQISDMSTLLREINDVFEGRRGEKYGYLSLPKPMKNNANLKSLKPDKPDSEEQAKIAKLGLKLGLLTSDADCEIEKWEDQENEIVQYGRNMSSMAYSLYLFTRGEGPLKTSQDLIHQLEVFAAEGLKLTSSVQAFSKQLKDDDKLMLLLEINKLIPLCHQLQTVTKTSLQNKVFLKVDKCITKTRSMMALLVQLLSLCYKLLKKLQMENNGWVSVTNKDTMDSKT

SEQ ID NO: 4366 - protein, 622 aa, Homo sapiens
  FANCG (NCBI Accession: NP_004620)
MSRQTTSVGSSCLDLWREKNDRLVRQAKVAQNSGLTLRRQQLAQDALEGLRGLLHSLQGLPAAVPVLPLELTVTCNFIILRASLAQGFTEDQAQDIQRSLERVLETQEQQGPRLEQGLRELWDSVLRASCLLPELLSALHRLVGLQAALWLSADRLGDLALLLETLNGSQSGASKDLLLLLKTWSPPAEELDAPLTLQDAQGLKDVLLTAFAYRQGLQELITGNPDKALSSLHEAASGLCPRPVLVQVYTALGSCHRKMGNPQRALLYLVAALKEGSAWGPPLLEASRLYQQLGDTTAELESLELLVEALNVPCSSKAPQFLIEVELLLPPPDLASPLHCGTQSQTKHILASRCLQTGRAGDAAEHYLDLLALLLDSSEPRFSPPPSPPGPCMPEVFLEAAVALIQAGRAQDALTLCEELLSRTSSLLPKMSRLWEDARKGTKELPYCPLWVSATHLLQGQAWVQLGAQKVAISEFSRCLELLFRATPEEKEQGAAFNCEQGCKSDAALQQLRAAALISRGLEWVASGQDTKALQDFLLSVQMCPGNRDTYFHLLQTLKRLDRRDEATALWWRLEAQTKGSHEDALWSLPLYLESYLSWIRPSDRDAFLEEFRTSLPKSCDL

SEQ ID NO: 4367 - protein, 670 aa, Homo sapiens [sequence omitted]

SEQ ID NO: 4368 - protein, 288 aa, Homo sapiens
  STX1A (NCBI Accession: NP_004594)
MKDRTQELRTAKDSDDDDDVAVTVDRDRFMDEFFEQVEEIRGFIDKIAENVEEVKRKHSAILASPNPDEKTKEELEELMSDIKKTANKVRSKLKSIEQSIEQEEGLNRSSADLRIRKTQHSTLSRKFVEVMSEYNATQSDYRERCKGRIQRQLEITGRTTTSEELEDMLESGNPAIFASGIIMDSSISKQALSEIETRHSEIIKLENSIRELHDMFMDMAMLVESQGEMIDRIEYNVEHAVDYVERAVSDTKKAVKYQSKARRKKIMIIICCVILGIVIASTVGGIFA

SEQ ID NO: 4369 - protein, 209 aa, Homo sapiens
  GMNN (NCBI Accession: NP_056979)
MNPSMKQKQEEIKENIKNSSVPRRTLKMIQPSASGSLVGRENELSAGLSKRKHRNDHLTSTTSSPGVIVPESSENKNLGGVTQESFDLMIKENPSSQYWKEVAEKRRKALYEALKENEKLHKEIEQKDNEIARLKKENKELAEVAEHVQYMAELIERLNGEPLDNFESLDNQEFDSEEETVEDSLVEDSEIGTCAEGTVSSSTDAKPCI

SEQ ID NO: 4370 - protein, 561 aa, Homo sapiens
  UBQLN1 (NCBI Accession: NP_444295)
MAESGESGGPPGSQDSAAGAEGAGAPAAAASAEPKIMKVTVKTPKEKEEFAVPENSSVQQFKEEISKRFKSHTDQLVLIFAGKILKDQDTLSQHGIHDGLTVHLVIKTQNRPQDHSAQQTNTAGSNVTTSSTPNSNSTSGSATSNPFGLGGLGGLAGLSSLGLNTTNFSELQSQMQRQLLSNPEMMVQIMENPFVQSMLSNPDLMRQLIMANPQMQQLIQRNPEISHMLNNPDIMRQTLELARNPAMMQEMMRNQDRALSNLESIPGGYNALRRMYTDIQEPMLSAAQEQFGGNPFASLVSNTSSGEGSQPSRTENRDPLPNPWAPQTSQSSSASSGTASTVGGTTGSTASGTSGQSTTAPNLVPGVGASMFNTPGMQSLLQQITENPQLMQNMLSAPYMRSMMQSLSQNPDLAAQMQNPDTLSAMSNPRAMQALLQIQQGLQTLATEAPGLIPGFTPGLGALGSTGGSSGTNGSNATPSENTSPTAGTTEPGHQQFIQQMLQALAGVNPQLQNPEVRFQQQLEQLSAMGFLNREANLQALIATGGDINAAIERLLGSQPS

SEQ ID NO: 4371 - protein, 475 aa, Homo sapiens
  CNDP2 (NCBI Accession: NP_060705)
MAALTTLFKYIDENQDRYIKKLAKWVAIQSVSAWPEKRGEIRRMMEVAAADVKQLGGSVELVDIGKQKLPDGSEIPLPPILLGRLGSDPQKKTVCIYGHLDVQPAALEDGWDSEPFTLVERDGKLYGRGSTDDKGPVAGWINALEAYQKTGQEIPVNVRFCLEGMEESGSEGLDELIFARKDTFFKDVDYVCISDNYWLGKKKPCITYGLRGICYFFIEVECSNKDLHSGVYGGSVHEAMTDLILLMGSLVDKRGNILIPGINEAVAAVTEEEHKLYDDIDFDIEEFAKDVGAQILLHSHKKDILMHRWRYPSLSLHGIEGAFSGSGAKTVIPRKVVGKFSIRLVPNMTPEVVGEQVTSYLTKKFAELRSPNEFKVYMGHGGKPWVSDFSHPHYLAGRRAMKTVFGVEPDLTREGGSIPVTLTFQEATGKNVMLLPVGSADDGAHSQNEKLNRYNYIEGTKMLAAYLYEVSQLKD

SEQ ID NO: 4372 - protein, 497 aa, Homo sapiens
  XIAP (NCBI Accession: NP_001191330)
MTFNSFEGSKTCVPADINKEEEFVEEFNRLKTFANFPSGSPVSASTLARAGFLYTGEGDTVRCFSCHAAVDRWQYGDSAVGRHRKVSPNCRFINGFYLENSATQSTNSGIQNGQYKVENYLGSRDHFALDRPSETHADYLLRTGQVVDISDTIYPRNPAMYSEEARLKSFQNWPDYAHLTPRELASAGLYYTGIGDQVQCFCCGGKLKNWEPCDRAWSEHRRHFPNCFFVLGRNLNIRSESDAVSSDRNFPNSTNLPRNPSMADYEARIFTFGTWIYSVNKEQLARAGFYALGEGDKVKCFHCGGGLTDWKPSEDPWEQHAKWYPGCKYLLEQKGQEYINNIHLTHSLEECLVRTTEKTPSLTRRIDDTIFQNPMVQEAIRMGFSFKDIKKIMEEKIQISGSNYKSLEVLVADLVNAQKDSMQDESSQTSLQKEISTEEQLRRLQEEKLCKICMDRNIAIVFVPCGHLVTCKQCAEAVDKCPMCYTVITFKQKIFMS

SEQ ID NO: 4373 - protein, 354 aa, Homo sapiens
  SDCCAG3 (NCBI Accession: NP_006634)
MCYVPSPVLASVGDTDDRFEDLEEANPFSFREFLKTKNLGLSKEDPASRIYAKEASRHSLGLDHNSPPSQTGGYGLEYQQPFFEDPTGAGDLLDGEEDEDTGWSGAYLPSAIEQTHPERVPAGTSPCSTYLSFFSTPSELAGPESLPSWALSDTDSRVSPASPAGSPSADFAVHGESLGDRHLRTLQISYDALKDENSKLRRKLNEVQSFSEAQTEMVRTLERKLEAKMIKEESDYHDLESVVQQVEQNLELMTKRAVKAENHVVKLKQEISLLQAQVSNFQRENEALRCGQGASLTVVKQNADVALQNLRVVMNSAQASIKQLVSGAETLNLVAEILKSIDRISEIKDEEEDS

SEQ ID NO: 4374 - protein, 224 aa, Homo sapiens
  CHMP4B (NCBI Accession: NP_789782)
MSVFGKLFGAGGGKAGKGGPTPQEAIQRLRDTEEMLSKKQEFLEKKIEQELTAAKKHGTKNKRAALQALKRKKRYEKQLAQIDGTLSTIEFQREALENANTNTEVLKNMGYAAKAMKAAHDNMDIDKVDELMQDIADQQELAEEISTAISKPVGFGEEFDEDELMAELEELEQEELDKNLLEISGPETVPLPNVPSIALPSKPAKKKEEEDDDMKELENWAGSM

SEQ ID NO: 4375 - protein, 470 aa, Homo sapiens
  GYG2 (NCBI Accession: NP_003909)
MSVTDQAFVTLATNDIYCQGALVLGQSLRRHRLTRKLVVLITPQVSSLLRVILSKVFDEVIEVNLIDSADYIHLAFLKRPELGLTLTKLHCWTLTHYSKCVFLDADTLVLSNVDELFDRGEFSAAPDPGWPDCFNSGVFVFQPSLHTHKLLLQHAMEHGSFDGADQGLLNSFFRNWSTTDIHKHLPFIYNLSSNTMYTYSPAFKQFGSSAKVVHFLGSMKPWNYKYNPQSGSVLEQGSVSSSQHQAAFLHLWWTVYQNNVLPLYKSVQAGEARASPGHTLCRSDVGGPCADSASGVGEPCENSTPSAGVPCANSPLGSNQPAQGLPEPTQIVDETLSLPEGRRSEDMIACPETETPAVITCDPLSQPSPQPADFTETETILQPANKVESVSSEETFEPSQELPAEALRDPSLQDALEVDLAVSVSQISIEEKVKELSPEEERRKWEEGRIDYMGKDAFARIQEKLDRFLQ

SEQ ID NO: 4376 - protein, 195 aa, Homo sapiens
  EGFEM1P (NCBI Accession: NR_021485)
MDELRWYHITVCLDHIFGHNCSLSCKDCMNGGKCQEGKSECSCPAGCRVILCNENCLEGAYGAGCTSECQCVEENTLECSAKNGSCTCKSGYQGNRCQKDGLWGPEGWFSSAPCENGGQCNKKTGNCDCTPDYTRKSCTILRCISLTNLALSRRSSPMKYQQNVSSHREVRQRQQCSSDRPFKKLLCKFSFKIGM

SEQ ID NO: 4377 - protein, 911 aa, Homo sapiens
  ACTN4 (NCBI Accession: NP_004915)
MVDYHAANQSYQYGPSSAGNGAGGGGSMGDYMAQEDDWDRDLLLDPAWEKQQRKTFTAWCNSHLRKAGTQIENIDEDFRDGLKLMLLLEVISGERLPKPERGKMRVHKINNVNKALDFIASKGVKLVSIGAEEIVDGNAKMTLGMIWTIILRFAIQDISVEETSAKEGLLLWCQRKTAPYKNVNVQNFHISWKDGLAFNALIHRHRPELIEYDKLRKDDPVTNLNNAFEVAEKYLDIPKMLDAEDIVNTARPDEKAIMTYVSSFYHAFSGAQKAETAANRICKVLAVNQENEHLMEDYEKLASDLLEWIRRTIPWLEDRVPQKTIQEMQQKLEDFRDYRRVHKPPKVQEKCQLEINFNTLQTKLRLSNRPAFMPSEGKMVSDINNGWQHLEQAEKGYEEWLLNEIRRLERLDHLAEKFRQKASIHEAWTDGKEAMLKHRDYETATLSDIKALIRKHEAFESDLAAHQDRVEQIAAIAQELNELDYYDSHNVNTRCQKICDQWDALGSLTHSRREALEKTEKQLEAIDQLHLEYAKRAAPFNNWMESAMEDLQDMFIVHTIEEIEGLISAHDQFKSTLPDADREREAILAIHKEAQRIAESNHIKLSGSNPYTTVTPQIINSKWEKVQQLVPKRDHALLEEQSKQQSNEHLRRQFASQANVVGPWIQTKMEEIGRISIEMNGTLEDQLSHLKQYERSIVDYKPNLDLLEQQHQLIQEALIFDNKHTNYTMEHIRVGWEQLLTTIARTINEVENQILTRDAKGISQEQMQEFRASFNHFDKDHGGALGPEEFKACLISLGYDVENDRQGEAEFNRIMSLVDPNHSGLVTFQAFIDFMSRETTDTDTADQVIASFKVLAGDKNFITAEELRRELPPDQAEYCIARMAPYQGPDAVPGALDYKSFSTALYGESDL

SEQ ID NO: 4378 - protein, 756 aa, Homo sapiens
  PLCD1 (NCBI Accession: NP_006216)
MDSGRDFLTLHGLQDDEDLQALLKGSQLLKVKSSSWRRERFYKLQEDCKTIWQESRKVMRTPESQLFSIEDIQEVRMGHRTEGLEKFARDVPEDRCFSIVFKDQRNTLDLIAPSPADAQHWVLGLHKIIHHSGSMDQRQKLQHWIHSCLRKADKNKDNKMSFKELQNFLKELNIQVDDSYARKIFRECDHSQTDSLEDEEIEAFYKMLTQRVEIDRTFAEAAGSGETLSVDQLVTFLQHQQREEAAGPALALSLIERYEPSETAKAQRQMTKDGFLMYLLSADGSAFSLAHRRVYQDMGQPLSHYLVSSSHNTYLLEDQLAGPSSTEAYIRALCKGCRCLELDCWDGPNQEPIIYHGYTFTSKILFCDVLRAIRDYAFKASPYPVILSLENHCTLEQQRVMARHLHAILGPMLLNRPLDGVTNSLPSPEQLKGKILLKGKKLGGLLPPGGEGGPEATVVSDEDEAAEMEDEAVRSRVQHKPKEDKLRLAQELSDMVIYCKSVHFGGFSSPGTPGQAFYEMASFSENRALRLLQESGNGFVRHNVGHLSRIYPAGWRTDSSNYSPVEMWNGGCQIVALNFQTPGPEMDVYQGRFQDNGACGYVLKPAFLRDPNGTFNPRALAQGPWWARKRLNIRVISGQQLPKVNKNKNSIVDPKVTVEIHGVSRDVASRQTAVITNNGFNPWWDTEFAFEVVVPDLALIRFLVEDYDASSKNDFIGQSTIPLNSLKQGYRHVHLMSKNGDQHPSATLFVKISLQD

SEQ ID NO: 4379 - protein, 582 aa, Homo sapiens [sequence omitted]

SEQ ID NO: 4380 - protein, 92 aa, Homo sapiens
  LN608403.1_frag
MVTVRASLQSEFVCLILSDTSDAVKQGQSGSWIVTTHADIKQTLPSGTEGTTVTRNCCPFIPGFRRLYQKEWKMLVGSKIETASEDWFCTKP

SEQ ID NO: 4381 - protein, 55 aa, Homo sapiens
  JPX_frag
MHEQTENFHKEIKDNKKYKVEEYNNWTQKFNVSNRRIDEAEERAIKLVDRPLEIM

SEQ ID NO: 4382 - protein, 170 aa, Homo sapiens
  OBP2A (NCBI Accession: NP_055397)
MKTLFLGVTLGLAAALSFTLEEEDITGTWYVKAMVVDKDFPEDRRPRKVSPVKVTALGGGNLEATFTFMREDRCIQKKILMRKTEEPGKFSAYGGRKLIYLQELPGTDDYVFYCKDQRRGGLRYMGKLVGRNPNTNLEALEEFKKLVQHKGLSEEDIFMPLQTGSCVLEH

SEQ ID NO: 4383 - protein, 1184 aa, Homo sapiens
  MYT1L (NCBI Accession: NP_055840)
MEVDTEEKRHRTRSKGVRVPVEPAIQELFSCPTPGCDGSGHVSGKYARHRSVYGCPLAKKRKTQDKQPQEPAPKRKPFAVKADSSSVDECDDSDGTEDMDEKEEDEGEEYSEDNDEPGDEDEEDEEGDREEEEEIEEEDEDDDEDGEDVEDEEEEEEEEEEEEEEEENEDHQMNCHNTRIMQDTEKDDNNNDEYDNYDELVAKSLLNLGKIAEDAAYRARTESEMNSNTSNSLEDDSDKNENLGRKSELSLDLDSDVVRETVDSLKLLAQGHGVVLSENMNDRNYADSMSQQDSRNMNYVMLGKPMNNGLMEKMVEESDEEVCLSSLECLRNQCFDLARKLSETNPQERNPQQNMNIRQHVRPEEDFPGRTPDRNYSDMLNLMRLEEQLSPRSRVFASCAKEDGCHERDDDTTSVNSDRSEEVFDMTKGNLTLLEKAIALETERAKAMREKMAMEAGRRDNMRSYEDQSPRQLPGEDRKPKSSDSHVKKPYYDPSRTEKKESKCPTPGCDGTGHVTGLYPHHRSLSGCPHKDRVPPEILAMHESVLKCPTPGCTGRGHVNSNRNSHRSLSGCPIAAAEKLAKAQEKHQSCDVSKSSQASDRVLRPMCFVKQLEIPQYGYRNNVPTTTPRSNLAKELEKYSKTSFEYNSYDNHTYGKRAIAPKVQTRDISPKGYDDAKRYCKDPSPSSSSTSSYAPSSSSNLSCGGGSSASSTCSKSSFDYTHDMEAAHMAATAILNLSTRCREMPQNLSTKPQDLCATRNPDMEVDENGTLDLSMNKQRPRDSCCPILTPLEPMSPQQQAVMNNRCFQLGEGDCWDLPVDYTKMKPRRIDEDESKDITPEDLDPFQEALEERRYPGEVTIPSPKPKYPQCKESKKDLITLSGCPLADKSIRSMLATSSQELKCPTPGCDGSGHITGNYASHRSLSGCPRAKKSGIRIAQSKEDKEDQEPIRCPVPGCDGQGHITGKYASHRSASGCPLAAKRQKDGYLNGSQFSWKSVKTEGMSCPTPGCDGSGHVSGSFLTHRSLSGCPRATSAMKKAKLSGEQMLTIKQRASNGIENDEEIKQLDEEIKELNESNSQMEADMIKLRTQITTMESNLKTIEEENKVIEQQNESLLHELANLSQSLIHSLANIQLPHMDPINEQNFDAYVTTLTEMYTNQDRYQSPENKALLENIKQAVRGIQV

SEQ ID NO: 4384 - protein, 102 aa, Homo sapiens
  HSPE1 (NCBI Accession: NP_002148)
MAGQAFRKFLPLFDRVLVERSAAETVTKGGIMLPEKSQGKVLQATVVAVGSGSKGKGGEIQPVSVKVGDKVLLPEYGGTKVVLDDKDYFLFRDGDILGKYVD

SEQ ID NO: 4385 - protein, 624 aa, Homo sapiens
  KEAP1 (NCBI Accession: NP_987096)
MQPDPRPSGAGACCRFLPLQSQCPEGAGDAVMYASTECKAEVTPSQHGNRTFSYTLEDHTKQAFGIMNELRLSQQLCDVTLQVKYQDAPAAQFMAHKVVLASSSPVFKAMFTNGLREQGMEVVSIEGIHPKVMERLIEFAYTASISMGEKCVLHVMNGAVMYQIDSVVRACSDFLVQQLDPSNAIGIANFAEQIGCVELHQRAREYIYMHFGEVAKQEEFFNLSHCQLVTLISRDDLNVRCESEVFHACINWVKYDCEQRRFYVQALLRAVRCHSLTPNFLQMQLQKCEILQSDSRCKDYLVKIFEELTLHKPTQVMPCRAPKVGRLIYTAGGYFRQSLSYLEAYNPSDGTWLRLADLQVPRSGLAGCVVGGLLYAVGGRNNSPDGNTDSSALDCYNPMTNQWSPCAPMSVPRNRIGVGVIDGHIYAVGGSHGCIHHNSVERYEPERDEWHLVAPMLTRRIGVGVAVLNRLLYAVGGFDGTNRLNSAECYYPERNEWRMITAMNTIRSGAGVCVLHNCIYAAGGYDGQDQLNSVERYDVETETWTFVAPMKHRRSALGITVHQGRIYVLGGYDGHTFLDSVECYDPDTDTWSEVTRMTSGRSGVGVAVTMEPCRKQIDQQNCTC

SEQ ID NO: 4386 - protein, 391 aa, Homo sapiens
  NAP1L1 (NCBI Accession: NP_631946)
MADIDNKEQSELDQDLDDVEEVEEEETGEETKLKARQLTVQMMQNPQILAALQERLDGLVETPTGYIESLPRVVKRRVNALKNLQVKCAQIEAKFYEEVHDLERKYAVLYQPLFDKRFEIINAIYEPTEEECEWKPDEEDEISEELKEKAKIEDEKKDEEKEDPKGIPEFWLTVFKNVDLLSDMVQEHDEPILKHLKDIKVKFSDAGQPMSFVLEFHFEPNEYFTNEVLTKTYRMRSEPDDSDPFSFDGPEIMGCTGCQIDWKKGKNVTLKTIKKKQKHKGRGTVRTVTKTVSNDSFFNFFAPPEVPESGDLDDDAEAILAADFEIGHFLRERIIPRSVLYFTGEAIEDDDDDYDEEGEEADEEGEEEGDEENDPDYDPKKDQNPAECKQQ

SEQ ID NO: 4387 - protein, 335 aa, Homo sapiens
  NDE1 (NCBI Accession: NP_001137451)
MEDSGKTFSSEEEEANYWKDLAMTYKQRAENTQEELREFQEGSREYEAELETQLQQIETRNRDLLSENNRLRMELETIKEKFEVQHSEGYRQISALEDDLAQTKAIKDQLQKYIRELEQANDDLERAKRATIMSLEDFEQRLNQAIERNAFLESELDEKENLLESVQRLKDEARDLRQELAVQQKQEKPRTPMPSSVEAERTDTAVQATGSVPSTPIAHRGPSSSLNTPGSFRRGLDDSTGGTPLTPAARISALNIVGDLLRKVGALESKLASCRNLVYDQSPNRTGGPASGRSSKNRDGGERRPSSTSVPLGDKGLDTSCRWLSKSTTRSSSSC

SEQ ID NO: 4388 - protein, 349 aa, Homo sapiens
  TRUB1 (NCBI Accession: NP_631908)
MAASEAAVVSSPSLKTDTSPVLETAGTVAAMAATPSARAAAAVVAAAARTGSEARVSKAALATKLLSLSGVFAVHKPKGPTSAELLNRLKEKLLAEAGMPSPEWTKRKKQTLKIGHGGTLDSAARGVLVVGIGSGTKMLTSMLSGSKRYTAIGELGKATDTLDSTGRVTEEKPYDKITQEDIEGILQKFTGNIMQVPPLYSALKKDGQRLSTLMKRGEVVEAKPARPVTVYSISLQKFQPPFFTLDVECGGGFYIRSLVSDIGKELSSCANVLELTRTKQGPFTLEEHALPEDKWTIDDIAQSLEHCSSLFPAELALKKSKPESNEQVLSCEYITLNEPKREDDVIKTC

SEQ ID NO: 4389 - protein, 514 aa, Homo sapiens
  IMPDH2 (NCBI Accession: NP_000875)
MADYLISGGTSYVPDDGLTAQQLFNCGDGLTYNDFLILPGYIDFTADQVDLTSALTKKITLKTPLVSSPMDTVTEAGMAIAMALTGGIGFIHHNCTPEFQANEVRKVKKYEQGFITDPVVLSPKDRVRDVFEAKARHGFCGIPITDTGRMGSRLVGIISSRDIDFLKEEEHDCFLEEIMTKREDLVVAPAGITLKEANEILQRSKKGKLPIVNEDDELVAIIARTDLKKNRDYPLASKDAKKQLLCGAAIGTHEDDKYRLDLLAQAGVDVVVLDSSQGNSIFQINMIKYIKDKYPNLQVIGGNVVTAAQAKNLIDAGVDALRVGMGSGSICITQEVLACGRPQATAVYKVSEYARRFGVPVIADGGIQNVGHIAKALALGASTVMMGSLLAATTEAPGEYFFSDGIRLKKYRGMGSLDAMDKHLSSQNRYFSEADKIKVAQGVSGAVQDKGSIHKFVPYLIAGIQHSCQDIGAKSLTQVRAMMYSGELKFEKRTSSAQVEGGVHSLHSYEKRLF

SEQ ID NO: 4390 - protein, 329 aa, Homo sapiens
  PLSCR4 (NCBI Accession: XP_011511333)
MSGVVPTAPEQPAGEMENQTKPPDPRPDAPPEYSSHFLPGPPGTAVPPPTGYPGGLPMGYYSPQQPSTFPLYQPVGGIHPVRYQPGKYPMPNQSVPITWMPGPTPMANCPPGLEYLVQLDNIHVLQHFEPLEMMTCFETNNRYDIKNNSDQMVYVVTEDTDDFTRNAYRTLRPFVLRVTDCMGREIMTMQRPFRCTCCCFCCPSARQELEVQCPPGVTIGFVAEHWNLCRAVYSIQNEKKENVMRVRGPCSTYGCGSDSVFEVKSLDGISNIGSIIRKWNGLLSAMADADHFDIHFPLDLDVKMKAMIFGACFLIDFMYFERSPPQRSR

SEQ ID NO: 4391 - protein, 642 aa, Homo sapiens [sequence omitted]

SEQ ID NO: 4392 - protein, 716 aa, Homo sapiens
  DVL3 (NCBI Accession: NP_004414)
MGETKIIYHLDGQETPYLVKLPLPAERVTLADFKGVLQRPSYKFFFKSMDDDFGVVKEEISDDNAKLPCFNGRVVSWLVSAEGSHPDPAPFCADNPSELPPPMERTGGIGDSRPPSFHPHAGGGSQENLDNDTETDSLVSAQRERPRRRDGPEHATRLNGTAKGERRREPGGYDSSSTLMSSELETTSFFDSDEDDSTSRFSSSTEQSSASRLMRRHKRRRRKQKVSRIERSSSFSSITDSTMSLNIITVTLNMEKYNFLGISIVGQSNERGDGGIYIGSIMKGGAVAADGRIEPGDMLLQVNEINFENMSNDDAVRVLREIVHKPGPITLTVAKCWDPSPRGCFTLPRSEPIRPIDPAAWVSHTAAMTGTFPAYGMSPSLSTITSTSSSITSSIPDTERLDDFHLSIHSDMAAIVKAMASPESGLEVRDRMLLKITIPNAFIGSDVVDWLYHNVEGFTDRREARKYASNLLKAGFIRHTVNKITFSEQCYYIFGDLCGNMANLSLHDHDGSSGASDQDTLAPLPHPGAAPWPMAFPYQYPPPPHPYNPHPGFPELGYSYGGGSASSQHSEGSRSSGSNRSGSDRRKEKDPKAGDSKSGGSGSESDHTTRSSLRGPRERAPSERSGPAASEHSHRSHHSLASSLRSHHTHPSYGPPGVPPLYGPPMLMMPPPPAAMGPPGAPPGRDLASVPPELTASRQSFRMAMGNPSEFFVDVM

SEQ ID NO: 4393 - protein, 412 aa, Homo sapiens
  ZNF260 (NCBI Accession: NP_001012774)
MIGMLESLQHESDLLQHDQIHTGEKPYECNECRKTFSLKQNLVEHKKMHTGEKSHECTECGKVCSRVSSLTLHLRSHTGKKAYKCNKCGKAFSQKENFLSHQKHHTGEKPYECEKVSIQMPTIIRHQKNHTGTKPYACKECGKAFNGKAYLTEHEKIHTGEKPFECNQCGRAFSQKQYLIKHQNIHTGKKPFKCSECGKAFSQKENLIIHQRIHTGEKPYECKGCGKAFIQKSSLIRHQRSHTGEKPYTCKECGKAFSGKSNLTEHEKIHIGEKPYKCNECGTIFRQKQYLIKHHNIHTGEKPYECNKCGKAFSRITSLIVHVRIHTGDKPYECKVCGKAFCQSSSLTVHMRSHTGEKPYGCNECGKAFSQFSTLALHMRIHTGEKPYQCSECGKAFSQKSHHIRHQRIHTH

SEQ ID NO: 4394 - protein, 574 aa, Homo sapiens
  SNX33 (NCBI Accession: NP_695003)
MALKGRALYDFHSENKEEISIQQDEDLVIFSETSLDGWLQGQNSRGETGLFPASYVEIVRSGISTNHADYSSSPAGSPGAQVSLYNSPSVASPARSGGGSGFLSNQGSFEEDDDDDWDDWDDGCTVVEEPRAGGLGTNGHPPLNLSYPGAYPSQHMAFRPKPPLERQDSLASAKRGSVVGRNLNRFSCFVRSGVEAFILGDVPMMAKIAETYSIEMGPRGPQWKANPHPFACSVEDPTKQTKFKGIKSYISYKLTPTHAASPVYRRYKHFDWLYNRLLHKFTVISVPHLPEKQATGRFEEDFIEKRKRRLILWMDHMTSHPVLSQYEGFQHFLSCLDDKQWKMGKRRAEKDEMVGASFLLTFQIPTEHQDLQDVEDRVDTFKAFSKKMDDSVLQLSTVASELVRKHVGGFRKEFQKLGSAFQAISHSFQMDPPFCSEALNSAISHTGRTYEAIGEMFAEQPKNDLFQMLDTLSLYQGLLSNFPDIIHLQKGAFAKVKESQRMSDEGRMVQDEADGIRRRCRVVGFALQAEMNHFHQRRELDFKHMMQNYLRQQILFYQRVGQQLEKTLRMYDNL

SEQ ID NO: 4395 - protein, 190 aa, Homo sapiens
  HN1L (NCBI Accession: NP_653171)
MFQVPDSEGGRAGSRAMKPPGGESSNLFGSPEEATPSSRPNRMASNIFGPTEEPQNIPKRTNPPGGKGSGIFDESTPVQTRQHLNPPGGKTSDIFGSPVTATSRLAHPNKPKDHVFLCEGEEPKSDLKAARSIPAGAEPGEKGSARKAGPAKEQEPMPTVDSHEPRLGPRPRSHNKVLNPPGGKSSISFY

SEQ ID NO: 4396 - protein, 208 aa, Homo sapiens [sequence omitted]

SEQ ID NO: 4397 - protein, 349 aa, Homo sapiens
  KHDRBS2 (NCBI Accession: NP_689901)
MEEEKYLPELMAEKDSLDPSFVHASRLLAEEIEKFQGSDGKKEDEEKKYLDVISNKNIKLSERVLIPVKQYPKFNFVGKLLGPRGNSLKRLQEETGAKMSILGKGSMRDKAKEEELRKSGEAKYAHLSDELHVLIEVFAPPGEAYSRMSHALEEIKKFLVPDYNDEIRQEQLRELSYLNGSEDSGRGRGIRGRGIRIAPTAPSRGRGGAIPPPPPPGRGVLTPRGSTVTRGALPVPPVARGVPTPRARGAPTVPGYRAPPPPAHEAYEEYGYDDGYGGEYDDQTYETYDNSYATQTQSVPEYYDYGHGVSEDAYDSYAPEEWATTSSSLKAPPQRSARGGYREHPYGRY

SEQ ID NO: 4398 - protein, 255 aa, Homo sapiens
  C1QL3 (NCBI Accession: NP_001010908)
MVLLLVILIPVLVSSAGTSAHYEMLGTCRMVCDPYGGTKAPSTAATPDRGLMQSLPTFIQGPKGEAGRPGKAGPRGPPGEPGPPGPMGPPGEKGEPGRQGLPGPPGAPGLNAAGAISAATYSTVPKIAFYAGLKRQHEGYEVLKFDDVVTNLGNHYDPTTGKFTCSIPGIYFFTYHVLMRGGDGTSMWADLCKNNQVRASAIAQDADQNYDYASNSVVLHLEPGDEVYIKLDGGKAHGGNNNKYSTFSGFIIYAD

SEQ ID NO: 4399 - protein, 154 aa, Homo sapiens
  PPP1R27 (NCBI Accession: NP_001007534)
MPSRTARYARYSPRQRRRRMLADRSVRFPNDVLFLDHIRQGDLEQVGRFIRTRKVSLATIHPSGLAALHEAVLSGNLECVKLLVKYGADIHQRDEAGWTPLHIACSDGYPDIARYLISLGADRDATNDDGDLPSDLIDPDYKELVELFKGTTMD

SEQ ID NO: 4400 - protein, 299 aa, Homo sapiens
  DNASE1L2 (NCBI Accession: NP_001365)
MGGPRALLAALWALEAAGTAALRIGAFNIQSFGDSKVSDPACGSIIAKILAGYDLALVQEVRDPDLSAVSALMEQINSVSEHEYSFVSSQPLGRDQYKEMYLFVYRKDAVSVVDTYLYPDPEDVFSREPFVVKFSAPGTGERAPPLPSRRALTPPPLPAAAQNLVLIPLHAAPHQAVAEIDALYDVYLDVIDKWGTDDMLFLGDFNADCSYVRAQDWAAIRLRSSEVFKWLIPDSADTTVGNSDCAYDRIVACGARLRRSLKPQSATVHDFQEEFGLDQTQALAISDHFPVEVTLKFHR

SEQ ID NO: 4401 - protein, 358 aa, Homo sapiens
  ESYT2_frag (NCBI Accession: NP_001354702)
MSVGHKAQESKIRYKTNEPVWEENFTFFIHNPKRQDLEVEVRDEQHQCSLGNLKVPLSQLLTSEDMTVSQRFQLSNSGPNSTIKMKIALRVLHLEKRERPPDHQHSAQVKRPSVSKEGRKTSIKSHMSGSPGPGGSNTAPSTPVIGGSDKPGMEEKAQPPEAGPQGLHDLGRSSSSLLASPGHISVKEPTPSIASDISLPIATQELRQRLRQLENGTTLGQSPLGQIQLTIRHSSQRNKLIVVVHACRNLIAFSEDGSDPYVRMYLLPDKRRSGRRKTHVSKKTLNPVFDQSFDFSVSLPEVQRRTLDVAVKNSGGFLSKDKGLLGKVLVALASEELAKGWTQWYDLTEDGTRPQAMT

SEQ ID NO: 4402 - protein, 89 aa, Homo sapiens
  CCL18 (NCBI Accession: NP_002979)
MKGLAAALLVLVCTMALCSCAQVGTNKELCCLVYTSWQIPQKFIVDYSETSPQCPKPGVILLTKRGRQICADPNKKWVQKYISDLKLNA

SEQ ID NO: 4403 - protein, 526 aa, Homo sapiens
  HOMEZ (NCBI Accession: NP_065885)
MPPNKEASGLSSSPAGLICLPPISEELQLVWTQAAQTSELDSNEHLLKTFSYFPYPSLADIALLCLRYGLQMEKVKTWFMAQRLRCGISWSSEEIEETRARVVYRRDQLHFKSLLSFTHHAGRPPEEVPPPPVPAPEQVGIGIGPPTLSKPTQTKGLKVEPEEPSQMPPLPQSHQKLKESLMTPGSGAFPYQSDFWQHLQSSGLSKEQAGRGPNQSHGIGTASWNHSTTVPQPQARDKPPPIALIASSCKEESASSVTPSSSSTSSSFQVLANGATAASKPLQPLGCVPQSVSPSEQALPPHLEPAWPQGLRHNSVPGRVGPTEYLSPDMQRQRKTKRKTKEQLAILKSFFLQCQWARREDYQKLEQITGLPRPEIIQWFGDTRYALKHGQLKWFRDNAVPGAPSFQDPAIPTPPPSTRSLNERAETPPLPIPPPPPDIQPLERYWAAHQQLRETDIPQLSQASRLSTQQVLDWFDSRLPQPAEVVVCLDEEEEEEEEELPEDDEEEEEEEEEDDDDDDDDVIIQD

SEQ ID NO: 4404 - protein, 520 aa, Homo sapiens
  BAIAP2 (NCBI Accession: NP_006331)
MSLSRSEEMHRLTENVYKTIMEQFNPSLRNFIAMGKNYEKALAGVTYAAKGYFDALVKMGELASESQGSKELGDVLFQMAEVHRQIQNQLEEMLKSFHNELLTQLEQKVELDSRYLSAALKKYQTEQRSKGDALDKCQAELKKLRKKSQGSKNPQKYSDKELQYIDAISNKQGELENYVSDGYKTALTEERRRFCFLVEKQCAVAKNSAAYHSKGKELLAQKLPLWQQACADPSKIPERAVQLMQQVASNGATLPSALSASKSNLVISDPIPGAKPLPVPPELAPFVGRMSAQESTPIMNGVTGPDGEDYSPWADRKAAQPKSLSPPQSQSKLSDSYSNTLPVRKSVTPKNSYATTENKTLPRSSSMAAGLERNGRMRVKAIFSHAAGDNSTLLSFKEGDLITLLVPEARDGWHYGESEKTKMRGWFPFSYTRVLDSDGSDRLHMSLQQGKSSSTGNLLDKDDLAIPPPDYGAASRAFPAQTASGFKQRPYSVAVPAFSQGLDDYGARSMSSADVEVARF

SEQ ID NO: 4405 - protein, 469 aa, Homo sapiens
  RUFY3 (NCBI Accession: NP_055776)
MSALTPPTDMPTPTTDKITQAAMETIYLCKFRVSMDGEWLCLRELDDISLTPDPEPTHEDPNYLMANERMNLMNMAKLSIKGLIESALNLGRTLDSDYAPLQQFFVVMEHCLKHGLKAKKTFLGQNKSFWGPLELVEKLVPEAAEITASVKDLPGLKTPVGRGRAWLRLALMQKKLSEYMKALINKKELLSEFYEPNALMMEEEGAIIAGLLVGLNVIDANFCMKGEDLDSQVGVIDFSMYLKDGNSSKGTEGDGQITAILDQKNYVEELNRHLNATVNNLQAKVDALEKSNTKLTEELAVANNRIITLQEEMERVKEESSYILESNRKGPKQDRTAEGQALSEARKHLKEETQLRLDVEKELEMQISMRQEMELAMKMLEKDVCEKQDALVSLRQQLDDLRALKHELAFKLQSSDLGVKQKSELNSRLEEKTNQMAATIKQLEQSEKDLVKQAKTLNSAANKLIPKHH

SEQ ID NO: 4406 - protein, 402 aa, Homo sapiens
  LHX5 (NCBI Accession: NP_071758)
MMVHCAGCERPILDRFLLNVLDRAWHIKCVQCCECKTNLSEKCFSREGKLYCKNDFFRRFGTKCAGCAQGISPSDLVRKARSKVFHLNCFTCMVCNKQLSTGEELYVIDENKFVCKDDYLSSSSLKEGSLNSVSSCTDRSLSPDLQDALQDDPKETDNSTSSDKETANNENEEQNSGTKRRGPRTTIKAKQLETLKAAFAATPKPTRHIREQLAQETGLNMRVIQVWFQNRRSKERRMKQLSALGARRHAFFRSPRRMRPLGGRLDESEMLGSTPYTYYGDYQGDYYAPGSNYDFFAHGPPSQAQSPADSSFLAASGPGSTPLGALEPPLAGPHAADNPRFTDMISHPDTPSPEPGLPGTLHPMPGEVFSGGPSPPFPMSGTSGYSGPLSHPNPELNEAAVW

SEQ ID NO: 4407 - protein, 217 aa, Homo sapiens [sequence omitted]

SEQ ID NO: 4408 - protein, 497 aa, Homo sapiens [sequence omitted]

SEQ ID NO: 4409 - protein, 367 aa, Homo sapiens
  LRRC28 (NCBI Accession: NP_653199)
MASELCKTISVARLEKHKNLFLNYRNLHHFPLELLKDEGLQYLERLYMKRNSLTSLPENLAQKLPNLVELYLHSNNIVVVPEAIGSLVKLQCLDLSDNALEIVCPEIGRLRALRHLRLANNQLQFLPPEVGDLKELQTLDISTNRLLTLPERLHMCLSLQYLTVDRNRLWYVPRHLCQLPSLNELSMAGNRLAFLPLDLGRSRELQYVYVDNNIHLKGLPSYLYNKVIGCSGCGAPIQVSEVKLLSFSSGQRTVFLPAEVKAIGTEHDHVLPLQELAMRGLYHTYHSLLKDLNFLSPISLPRSLLELLHCPLGHCHRCSEPMFTIVYPKLFPLRETPMAGLHQWKTTVSFVAYCCSTQCLQTFDLLS

SEQ ID NO: 4410 - protein, 139 aa, Homo sapiens
  SPATA33 (NCBI Accession: NP_694570)
MVTHAAGARTFCEEQKKGSTYSVPKSKEKLMEKHSQEARQADRESEKPVDSLHPGAGTAKHPPPAASLEEKPDVKQKSSRKKVVVPQIIITRASNETLVSCSSSGSDQQRTIREPEDWGPYRRHRNPSTADAYNSHLKE

SEQ ID NO: 4411 - protein, 939 aa, Homo sapiens
  ATP2C1 (NCBI Accession: NP_001001485)
MKVARFQKIPNGENETMIPVLTSKKASELPVSEVASILQADLQNGLNKCEVSHRRAFHGWNEFDISEDEPLWKKYISQFKNPLIMLLLASAVISVLMHQFDDAVSITVAILIVVTVAFVQEYRSEKSLEELSKLVPPECHCVREGKLEHTLARDLVPGDTVCLSVGDRVPADLRLFEAVDLSIDESSLTGETTPCSKVTAPQPAATNGDLASRSNIAFMGTLVRCGKAKGVVIGTGENSEFGEVFKMMQAEEAPKTPLQKSMDLLGKQLSFYSFGIIGIIMLVGWLLGKDILEMFTISVSLAVAAIPEGLPIVVTVTLALGVMRMVKKRAIVKKLPIVETLGCCNVICSDKTGTLTKNEMTVTHIFTSDGLHAEVTGVGYNQFGEVIVDGDVVHGFYNPAVSRIVEAGCVCNDAVIRNNTLMGKPTEGALIALAMKMGLDGLQQDYIRKAEYPFSSEQKWMAVKCVHRTQQDRPEICFMKGAYEQVIKYCTTYQSKGQTLTLTQQQRDVYQQEKARMGSAGLRVLALASGPELGQLTFLGLVGIIDPPRTGVKEAVTTLIASGVSIKMITGDSQETAVAIASRLGLYSKTSQSVSGEEIDAMDVQQLSQIVPKVAVFYRASPRHKMKIIKSLQKNGSVVAMTGDGVNDAVALKAADIGVAMGQTGTDVCKEAADMILVDDDFQTIMSAIEEGKGIYNNIKNFVRFQLSTSIAALTLISLATLMNFPNPLNAMQILWINIIMDGPPAQSLGVEPVDKDVIRKPPRNWKDSILTKNLILKILVSSIIIVCGTLFVFWRELRDNVITPRDTTMTFTCFVFFDMFNALSSRSQTKSVFEIGLCSNRMFCYAVLGSIMGQLLVIYFPPLQKVFQTESLSILDLLFLLGLTSSVCIVAEIIKKVERSREKIQKHVWLWERSGQQLVEIHPHLETGLPLTEDVSCV

SEQ ID NO: 4412 - protein, 1034 aa, Homo sapiens
  TSHZ2 (NCBI Accession: NP_775756)
MPRRKQQAPKRAAGYAQEEQLKEEEEIKEEEEEEDSGSVAQLQGGNDTGTDEELETGPEQKGCFSYQNSPGSHLSNQDAENESLLSDASDQVSDIKSVCGRDASDKKAHTHVRLPNEAHNCMDKMTAVYANILSDSYWSGLGLGFKLSNSERRNCDTRNGSNKSDFDWHQDALSKSLQQNLPSRSVSKPSLFSSVQLYRQSSKMCGTVFTGASRFRCRQCSAAYDTLVELTVHMNETGHYQDDNRKKDKLRPTSYSKPRKRAFQDMDKEDAQKVLKCMFCGDSFDSLQDLSVHMIKTKHYQKVPLKEPVPTISSKMVTPAKKRVFDVNRPCSPDSTTGSFADSFSSQKNANLQLSSNNRYGYQNGASYTWQFEACKSQILKCMECGSSHDTLQQLTTHMMVTGHFLKVTSSASKKGKQLVLDPLAVEKMQSLSEAPNSDSLAPKPSSNSASDCTASTTELKKESKKERPEETSKDEKVVKSEDYEDPLQKPLDPTIKYQYLREEDLEDGSKGGGDILKSLENTVTTAINKAQNGAPSWSAYPSIHAAYQLSEGTKPPLPMGSQVLQIRPNLTNKLRPIAPKWKVMPLVSMPTHLAPYTQVKKESEDKDEAVKECGKESPHEEASSFSHSEGDSFRKSETPPEAKKTELGPLKEEEKLMKEGSEKEKPQPLEPTSALSNGCALANHAPALPCINPLSALQSVLNNHLGKATEPLRSPSCSSPSSSTISMFHKSNLNVMDKPVLSPASTRSASVSRRYLFENSDQPIDLTKSKSKKAESSQAQSCMSPPQKHALSDIADMVKVLPKATTPKPASSSRVPPMKLEMDVRRFEDVSSEVSTLHKRKGRQSNWNPQHLLILQAQFASSLFQTSEGKYLLSDLGPQERMQISKFTGLSMTTISHWLANVKYQLRKTGGTKFLKNMDKGHPIFYCSDCASQFRTPSTYISHLESHLGFQMKDMTRLSVDQQSKVEQEISRVSSAQRSPETIAAEEDTDSKFKCKLCCRTFVSKHAVKLHLSKTHSKSPEHHSQFVTDVDEE

SEQ ID NO: 4413 - protein, 252 aa, Homo sapiens
  C4BPB (NCBI Accession: NP_000707)
MFFWCACCLMVAWRVSASDAEHCPELPPVDNSIFVAKEVEGQILGTYVCIKGYHLVGKKTLFCNASKEWDNTTTECRLGHCPDPVLVNGEFSSSGPVNVSDKITFMCNDHYILKGSNRSQCLEDHTWAPPFPICKSRDCDPPGNPVHGYFEGNNFTLGSTISYYCEDRYYLVGVQEQQCVDGEWSSALPVCKLIQEAPKPECEKALLAFQESKNLCEAMENFMQQLKESGMTMEELKYSLELKKAELKAKLL

SEQ ID NO: 4414 - protein, 275 aa, Homo sapiens
  NCCRP1 (NCBI Accession: NP_001001414)
MEEVREGHALGGGMEADGPASLQELPPSPRSPSPPPSPPPLPSPPSLPSPAAPEAPELPEPAQPSEAHARQLLLEEWGPLSGGLELPQRLTWKLLLLRRPLYRNLLRSPNPEGINIYEPAPPTGPTQRPLETLGNFRGWYIRTEKLQQNQSWTVKQQCVDLLAEGLWEELLDDEQPAITVMDWFEDSRLDACVYELHVWLLAADRRTVIAQHHVAPRTSGRGPPGRWVQVSHVFRHYGPGVRFIHFLHKAKNRMEPGGLRRTRVTDSSVSVQLRE

SEQ ID NO: 4415 - protein, 550 aa, Homo sapiens
  CCDC102A (NCBI Accession: XP_011521771)
MSHGPSPRLAESPQLSKGSLLTILGSPSPERMGPADSLPPTPPSGTPSPGPPPALPLPPAPALLADGDWESREELRLRELEEARARAAQMEKTMRWWSDCTANWREKWSKVRAERNRAREEVRQLRQRLDALTKELAGARRERQEAQGECEARGRELARLRGARGVADQTRDGPEPEAEREPVRDVGSERPPGSQELELVESLLKSMPEESEDCWEARSLGAGGPRGSSGRQERSRLPWEDTAATEEEASKLTALRLRLDESQKVLLKEREDKLALSRNIEKLEGELSQWKIKYEELSKTKQEMLKQLSILKEAHQDELGRMSEDLEDELGARSSMDRKMAELRGEMERLQAENAAEWGRRERLETEKLGLERENKKLRAQVGDLEEALARRRRQTASALDCDLRASQAALFEKNKELADLKHVHGKLKKQFQEKVAELAHANRRVEQHEAEVKKLRLRVEELKKELAQAEDELDEAHNQARKLQRSLDEQTEQSENLQVQLEHLQSRLRRQQQNAPLFGKIRSARFGTEEAEDGTSDLDEDEDLQIQVA

SEQ ID NO: 4416 - protein, 593 aa, Homo sapiens
  RBM47 (NCBI Accession: XP_005248166)
MTAEDSTAAMSSDSAAGSSAKVPEGVAGAPNEAALLALMERTGYSMVQENGQRKYGGPPPGWEGPHPQRGCEVFVGKIPRDVYEDELVPVFEAVGRIYELRLMMDFDGKNRGYAFVMYCHKHEAKRAVRELNNYEIRPGRLLGVCCSVDNCRLFIGGIPKMKKREEILEEIAKVTEGVLDVIVYASAADKMKNRGFAFVEYESHRAAAMARRKLMPGRIQLWGHQIAVDWAEPEIDVDEDVMETVKILYVRNLMIETTEDTIKKSFGQFNPGCVERVKKIRDYAFVHFTSREDAVHAMNNLNGTELEGSCLEVTLAKPVDKEQYSRYQKAARGGGAAEAAQQPSYVYSCDPYTLAYYGYPYNALIGPNRDYFVKAGSIRGRGRGAAGNRAPGPRGSYLGGYSAGRGIYSRYHEGKGKQQEKGYELVPNLEIPTVNPVAIKPGTVAIPAIGAQYSMFPAAPAPKMIEDGKIHTVEHMISPIAVQPDPASAAAAAAAAAAAAAAVIPTVSTPPPFQGRPITPVYTVAPNVQRIPTAGIYGASYVPFAAPATATIATLQKNAAAAAAVYGGYAGYIPQAFPAAAIQVPIPDVYQTY

SEQ ID NO: 4417 - protein, 282 aa, Homo sapiens
  RAD1 (NCBI Accession: NP_002844)
MPLLTQQIQDEDDQYSLVASLDNVRNLSTILKAIHFREHATCFATKNGIKVTVENAKCVQANAFIQAGIFQEFKVQEESVTFRINLTVLLDCLSIFGSSPMPGTLTALRMCYQGYGYPLMLFLEEGGVVTVCKINTQEPEETLDFDFCSTNVINKIILQSEGLREAFSELDMTSEVLQITMSPDKPYFRLSTFGNAGSSHLDYPKDSDLMEAFHCNQTQVNRYKISLLKPSTKALVLSCKVSIRTDNRGFLSLQYMIRNEDGQICFVEYYCCPDEEVPESES

SEQ ID NO: 4418 - protein, 436 aa, Homo sapiens
  MTUS1 (NCBI Accession: NP_001001924)
MLLSPKFSLSTIHIRLTAKGLLRNLRLPSGFRRSTVVFHTVEKSRQKNPRSLCIQPQTAPDALPPEKTLELTQYKTKCENQSGFILQLKQLLACGNTKFEALTVVIQHLLSEREEALKQHKTLSQELVNLRGELVTASTTCEKLEKARNELQTVYEAFVQQHQAEKTERENRLKEFYTREYEKLRDTYIEEAEKYKMQLQEQFDNLNAAHETSKLEIEASHSEKLELLKKAYEASLSEIKKGHEIEKKSLEDLLSEKQESLEKQINDLKSENDALNEKLKSEEQKRRAREKANLKNPQIMYLEQELESLKAVLEIKNEKLHQQDIKLMKMEKLVDNNTALVDKLKRFQQENEELKARMDKHMAISRQLSTEQAVLQESLEKESKVNKRLSMENEELLWKLHNGDLCSPKRSPTSSAIPLQSPRNSGSFPSPSISPR

SEQ ID NO: 4419 - protein, 423 aa, Homo sapiens
  GPR83 (NCBI Accession: NP_057624)
MVPHLLLLCLLPLVRATEPHEGRADEQSAEAALAVPNASHFFSWNNYTFSDWQNFVGRRRYGAESQNPTVKALLIVAYSFIIVFSLFGNVLVCHVIFKNQRMHSATSLFIVNLAVADIMITLLNTPFTLVRFVNSTWIFGKGMCHVSRFAQYCSLHVSALTLTAIAVDRHQVIMHPLKPRISITKGVIYIAVIWTMATFFSLPHAICQKLFTFKYSEDIVRSLCLPDFPEPADLFWKYLDLATFILLYILPLLIISVAYARVAKKLWLCNMIGDVTTEQYFALRRKKKKTIKMLMLVVVLFALCWFPLNCYVLLLSSKVIRTNNALYFAFHWFAMSSTCYNPFIYCWLNENFRIELKALLSMCQRPPKPQEDRQPSPVPSFRVAWTEKNDGQRAPLANNLLPTSQLQSGKTDLSSVEPIVTMS

SEQ ID NO: 4420 - protein, 461 aa, Homo sapiens
  CDS1 (NCBI Accession: NP_001254)
MLELRHRGSCPGPREAVSPPHREGEAAGGDHETESTSDKETDIDDRYGDLDSRTDSDIPEIPPSSDRTPEILKKALSGLSSRWKNWWIRGILTLTMISLFFLIIYMGSFMLMLLVLGIQVKCFHEIITIGYRVYHSYDLPWFRTLSWYFLLCVNYFFYGETVADYFATFVQREEQLQFLIRYHRFISFALYLAGFCMFVLSLVKKHYRLQFYMFAWTHVTLLITVTQSHLVIQNLFEGMIWFLVPISSVICNDITAYLFGFFFGRTPLIKLSPKKTWEGFIGGFFSTVVFGFIAAYVLSKYQYFVCPVEYRSDVNSFVTECEPSELFQLQTYSLPPFLKAVLRQERVSLYPFQIHSIALSTFASLIGPFGGFFASGFKRAFKIKDFANTIPGHGGIMDRFDCQYLMATFVHVYITSFIRGPNPSKVLQQLLVLQPEQQLNIYKTLKTHLIEKGILQPTLKV

SEQ ID NO: 4421 - protein, 541 aa, Homo sapiens
  DNAAF3 (NCBI Accession: NP_001243644)
MTTPAGSGSGFGSVSWWGLSPALDLQAESPPVDPDSQADTVHSNPELDVLLLGSVDGRHLLRTLSRAKFWPRRRFNFFVLENNLEAVARHMLIFSLALEEPEKMGLQERSETFLEVWGNALLRPPVAAFVRAQADLLAHLVPEPDRLEEQLPWLSLRALKFRERDALEAVFRFWAGGEKGPQAFPMSRLWDSRLRHYLGSRYDARRGVSDWDLRMKLHDRGAQVIHPQEFRRWRDTGVAFELRDSSAYHVPNRTLASGRLLSYRGERVAARGYWGDIATGPFVAFGIEADDESLLRTSNGQPVKTAGEITQHNVTELLRDVAAWGRARATGGDLEEQQHAEGSPEPGTPAAPTPESFTVHFLPLNSAQTLHHKSCYNGRFQLLYVACGMVHLLIPELGACVAPGGNLIVELARYLVDVRQEQLQGFNTRVRELAQAAGFAPQTGARPSETFARFCKSQESALGNTVPAVEPGTPPLDILAQPLEASNPALEGLTQPLQGGTPHCEPCQLPSESPGSLSEVLAQPQGALAPPNCESDSKTGV

SEQ ID NO: 4422 - protein, 537 aa, Homo sapiens
  CPNE1 (NCBI Accession: NP_690903)
MAHCVTLVQLSISCDHLIDKDIGSKSDPLCVLLQDVGGGSWAELGRTERVRNCSSPEFSKTLQLEYRFETVQKLRFGIYDIDNKTPELRDDDFLGGAECSLGQIVSSQVLTLPLMLKPGKPAGRGTITVSAQELKDNRVVTMEVEARNLDKKDFLGKSDPFLEFFRQGDGKWHLVYRSEVIKNNLNPTWKRFSVPVQHFCGGNPSTPIQVQCSDYDSDGSHDLIGTFHTSLAQLQAVPAEFECIHPEKQQKKKSYKNSGTIRVKICRVETEYSFLDYVMGGCQINFTVGVDFTGSNGDPSSPDSLHYLSPTGVNEYLMALWSVGSVVQDYDSDKLFPAFGFGAQVPPDWQVSHEFALNFNPSNPYCAGIQGIVDAYRQALPQVRLYGPTNFAPIINHVARFAAQAAHQGTASQYFMLLLLTDGAVTDVEATREAVVRASNLPMSVIIVGVGGADFEAMEQLDADGGPLHTRSGQAAARDIVQFVPYRRFQNAPREALAQTVLAEVPTQLVSYFRAQGWAPLKPLPPSAKDPAQAPQA

SEQ ID NO: 4423 - protein, 580 aa, Homo sapiens
  ADCK5 (NCBI Accession: NP_777582)
MWRPVQLCHFHSALLHRRQKPWPSPAVFFRRNVRGLPPRFSSPTPLWRKVLSTAVVGAPLLLGARYVMAEAREKRRMRLVVDGMGRFGRSLKVGLQISLDYWWCTNVVLRGVEENSPGYLEVMSACHQRAADALVAGAISNGGLYVKLGQGLCSFNHLLPPEYTRTLRVLEDRALKRGFQEVDELFLEDFQALPHELFQEFDYQPIAAASLAQVHRAKLHDGTSVAVKVQYIDLRDRFDGDIHTLELLLRLVEVMHPSFGFSWVLQDLKGTLAQELDFENEGRNAERCARELAHFPYVVVPRVHWDKSSKRVLTADFCAGCKVNDVEAIRSQGLAVHDIAEKLIKAFAEQIFYTGFIHSDPHPGNVLVRKGPDGKAELVLLDHGLYQFLEEKDRAALCQLWRAIILRDDAAMRAHAAALGVQDYLLFAEMLMQRPVRLGQLWGSHLLSREEAAYMVDMARERFEAVMAVLRELPRPMLLVLRNINTVRAINVALGAPVDRYFLMAKRAVRGWSRLAGATYRGVYGTSLLRHAKVVWEMLKFEVALRLETLAMRLTALLARALVHLSLVPPAEELYQYLET

SEQ ID NO: 4424 - protein, 175 aa, Homo sapiens
  CRYAB (NCBI Accession: NP_001276736)
MDIAIHHPWIRRPFFPFHSPSRLFDQFFGEHLLESDLFPTSTSLSPFYLRPPSFLRAPSWFDTGLSEMRLEKDRFSVNLDVKHFSPEELKVKVLGDVIEVHGKHEERQDEHGFISREFHRKYRIPADVDPLTITSSLSSDGVLTVNGPRKQVSGPERTIPITREEKPAVTAAPKK

SEQ ID NO: 4425 - protein, 486 aa, Homo sapiens [sequence omitted]

SEQ ID NO: 4426 - protein, 316 aa, Homo sapiens
  AKR1B1 (NCBI Accession: NP_001619)
MASRLLLNNGAKMPILGLGTWKSPPGQVTEAVKVAIDVGYRHIDCAHVYQNENEVGVAIQEKLREQVVKREELFIVSKLWCTYHEKGLVKGACQKTLSDLKLDYLDLYLIHWPTGFKPGKEFFPLDESGNVVPSDTNILDTWAAMEELVDEGLVKAIGISNFNHLQVEMILNKPGLKYKPAVNQIECHPYLTQEKLIQYCQSKGIVVTAYSPLGSPDRPWAKPEDPSLLEDPRIKAIAAKHNKTTAQVLIRFPMQRNLVVIPKSVTPERIAENFKVFDFELSSQDMTTLLSYNRNWRVCALLSCTSHKDYPFHEEF

SEQ ID NO: 4427 - protein, 361 aa, Homo sapiens
  SURF6 (NCBI Accession: NP_006744)
MASLLAKDAYLQSLAKKICSHSAPEQQARTRAGKTQGSETAGPPKKKRKKTQKKFRKREEKAAEHKAKSLGEKSPAASGARRPEAAKEEAAWASSSAGNPADGLATEPESVFALDVLRQRLHEKIQEARGQGSAKELSPAALEKRRRRKQERDRKKRKRKELRAKEKARKAEEATEAQEVVEATPEGACTEPREPPGLIFNKVEVSEDEPASKAQRRKEKRQRVKGNLTPLTGRNYRQLLERLQARQSRLDELRGQDEGKAQELEAKMKWTNLLYKAEGVKIRDDERLLQEALKRKEKRRAQRQRRWEKRTAGVVEKMQQRQDRRRQNLRRKKAARAERRLLRARKKGRILPQDLERAGLV

SEQ ID NO: 4428 - protein, 261 aa, Homo sapiens
  PCNA (NCBI Accession: NP_002583)
MFEARLVQGSILKKVLEALKDLINEACWDISSSGVNLQSMDSSHVSLVQLTLRSEGFDTYRCDRNLAMGVNLTSMSKILKCAGNEDIITLRAEDNADTLALVFEAPNQEKVSDYEMKLMDLDVEQLGIPEQEYSCVVKMPSGEFARICRDLSHIGDAVVISCAKDGVKFSASGELGNGNIKLSQTSNVDKEEEAVTIEMNEPVQLTFALRYLNFFTKATPLSSTVTLSMSADVPLVVEYKIADMGHLKYYLAPKIEDEEGS

SEQ ID NO: 4429 - protein, 92 aa, Homo sapiens
  S100B (NCBI Accession: NP_006263)
MSELEKAMVALIDVFHQYSGREGDKHKLKKSELKELINNELSHFLEEIKEQEVVDKVMETLDNDGDGECDFQEFMAFVAMVTTACHEFFEHE

SEQ ID NO: 4430 - protein, 586 aa, Homo sapiens
  CHEK2 (NCBI Accession: NP_001005735)
MSRESDVEAQQSHGSSACSQPHGSVTQSQGSSSQSQGISSSSTSTMPNSSQSSHSSSGTLSSLETVSTQELYSIPEDQEPEDQEPEEPTPAPWARLWALQDGFANLETESGHVTQSDLELLLSSDPPASASQSAGIRGVRHHPRPVCSLKCVNDNYWFGRDKSCEYCFDEPLLKRTDKYRTYSKKHFRIFREVGPKNSYIAYIEDHSGNGTFVNTELVGKGKRRPLNNNSEIALSLSRNKVFVFFDLTVDDQSVYPKALRDEYIMSKTLGSGACGEVKLAFERKTCKKVAIKIISKRKFAIGSAREADPALNVETEIEILKKLNHPCIIKIKNFFDAEDYYIVLELMEGGELFDKVVGNKRLKEATCKLYFYQMLLAVQYLHENGIIHRDLKPENVLLSSQEEDCLIKITDFGHSKILGETSLMRTLCGTPTYLAPEVLVSVGTAGYNRAVDCWSLGVILFICLSGYPPFSEHRTQVSLKDQITSGKYNFIPEVWAEVSEKALDLVKKLLVVDPKARFTTEEALRHPWLQDEDMKRKFQDLLSEENESTALPQVLAQPSTSRKRPREGEAEGAETTKRPAVCAAVL

SEQ ID NO: 4431 - protein, 343 aa, Homo sapiens
  ANKRD53 (NCBI Accession: NP_079209)
MASAGSTARRAGSGSWHSERGEGRGARPQPTPSGSMQQANKVSLKATWTDAESKQPSQPLPDLADHLSAQATALARPRRPASLTPPRADPSPSKESDQTAIDQTAIGSYYQLFAAAVGNVEWLRFCLNQSLREIPTDDKGFTAIHFAAQWGKLACLQVLVEEYKFPVDLLTNNSQTPLHLVIHRDNTTVALPCIYYLLEKGADLNAQTCNGSTPLHLAARDGLLDCVKVLVQSGANVHAQDAMGYKPIDFCKIWNHRACARFLKDAMWKKDKKDFAREMTKMKMFKSQLTLMEHNYLIEYQGQGCSVHFPFAFSPITPETLLWQDISLLSDCGFLWRRRELSF

SEQ ID NO: 4432 - protein, 409 aa, Homo sapiens
  KLRG2 (NCBI Accession: NP_940910)
MEESWEAAPGGQAGAELPMEPVGSLVPTLEQPQVPAKVRQPEGPESSPSPAGAVEKAAGAGLEPSSKKKPPSPRPGSPRVPPLSLGYGVCPEPPSPGPALVKLPRNGEAPGAEPAPSAWAPMELQVDVRVKPVGAAGGSSTPSPRPSTRFLKVPVPESPAFSRHADPAHQLLLRAPSQGGTWGRRSPLAAARTESGCDAEGRASPAEGSAGSPGSPTCCRCKELGLEKEDAALLPRAGLDGDEKLPRAVTLTGLPMYVKSLYWALAFMAVLLAVSGVVIVVLASRAGARCQQCPPGWVLSEEHCYYFSAEAQAWEASQAFCSAYHATLPLLSHTQDFLGRYPVSRHSWVGAWRGPQGWHWIDEAPLPPQLLPEDGEDNLDINCGALEEGTLVAANCSTPRPWVCAKGTQ

SEQ ID NO: 4433 - protein, 493 aa, Homo sapiens
  TRIM35 (NCBI Accession: NP_741983)
MERSPDVSPGPSRSFKEELLCAVCYDPFRDAVTLRCGHNFCRGCVSRCWEVQVSPTCPVCKDRASPADLRTNHTLNNLVEKLLREEAEGARWTSYRFSRVCRLHRGQLSLFCLEDKELLCCSCQADPRHQGHRVQPVKDTAHDFRAKCRNMEHALREKAKAFWAMRRSYEAIAKHNQVEAAWLEGRIRQEFDKLREFLRVEEQAILDAMAEETRQKQLLADEKMKQLTEETEVLAHEIERLQMEMKEDDVSFLMKHKSRKRRLFCTMEPEPVQPGMLIDVCKYLGSLQYRVWKKMLASVESVPFSFDPNTAAGWLSVSDDLTSVTNHGYRVQVENPERFSSAPCLLGSRVFSQGSHAWEVALGGLQSWRVGVVRVRQDSGAEGHSHSCYHDTRSGFWYVCRTQGVEGDHCVTSDPATSPLVLAIPRRLRVELECEEGELSFYDAERHCHLYTFHARFGEVRPYFYLGGARGAGPPEPLRICPLHISVKEELDG

SEQ ID NO: 4434 - protein, 673 aa, Homo sapiens
  FXR2 (NCBI Accession: NP_004851)
MGGLASGGDVEPGLPVEVRGSNGAFYKGFVKDVHEDSVTIFFENNWQSERQIPFGDVRLPPPADYNKEITEGDEVEVYSRANEQEPCGWWLARVRMMKGDFYVIEYAACDATYNEIVTLERLRPVNPNPLATKGSFFKVTMAVPEDLREACSNENVHKEFKKALGANCIFLNITNSELFILSTTEAPVKRASLLGDMHFRSLRTKLLLMSRNEEATKHLETSKQLAAAFQEEFTVREDLMGLAIGTHGANIHQARKVPGVTAIELGEETCTFRIYGETPEACRQARSYLEFSEDSVQVPRNLVGKVIGKNGKVIQEIVDKSGVVRVRVEGDNDKKNPREEGMVPFIFVGTRENISNAQALLEYHLSYLQEVEQLRLERLQIDEQLRQIGLGFRPPGSGRGSGGSDKAGYSTDESSSSSLHATRTYGGSYGGRGRGRRTGGPAYGPSSDVSTASETESEKREEPNRAGPGDRDPPTRGEESRRRPTGGRGRGPPPAPRPTSRYNSSSISSVLKDPDSNPYSLLDTSEPEPPVDSEPGEPPPASARRRRSRRRRTDEDRTVMDGGLESDGPNMTENGLEDESRPQRRNRSRRRRNRGNRTDGSISGDRQPVTVADYISRAESQSRQRPPLERTKPSEDSLSGQKGDSVSKLPKGPSENGELSAPLELGSMVNGVS

SEQ ID NO: 4435 - protein, 346 aa, Homo sapiens
  ANXA1 (NCBI Accession: NP_000691)
MAMVSEFLKQAWFIENEEQEYVQTVKSSKGGPGSAVSPYPTFNPSSDVAALHKAIMVKGVDEATIIDILTKRNNAQRQQIKAAYLQETGKPLDETLKKALTGHLEEVVLALLKTPAQFDADELRAAMKGLGTDEDTLIEILASRTNKEIRDINRVYREELKRDLAKDITSDTSGDFRNALLSLAKGDRSEDFGVNEDLADSDARALYEAGERRKGTDVNVFNTILTTRSYPQLRRVFQKYTKYSKHDMNKVLDLELKGDIEKCLTAIVKCATSKPAFFAEKLHQAMKGVGTRHKALIRIMVSRSEIDMNDIKAFYQKMYGISLCQAILDETKGDYEKILVALCGGN

SEQ ID NO: 4436 - protein, 754 aa, Homo sapiens
  ZNF287 (NCBI Accession: NP_065704)
MNSSSRSQILLRWKSDKAQSGPYNVEKEILTSRFLRDTETCRQNFRNFPYPDLAGPRKALSQLRELCLKWLRPEIHSKEQILELLVLEQFLTILPGEVRTWVKSQYPESSEEAVTLVEDLTQILEEEAPQNSTLSQDTPEEDPRGKHAFQTGWLNDLVTKESMTFKDVAVDITQEDWELMRPVQKELYKTVTLQNYWNMVSLGLTVYRPTVIPILEEPWMVIKEILEGPSPEWETKAQACTPVEDMSKLTKEETHTIKLEDSYDYDDRLERRGKGGFWKIHTDERGFSLKSVLSQEYDPTEECLSKYDIYRNNFEKHSNLIVQFDTQLDNKTSVYNEGRATFNHVSYGIVHRKILPGEKPYKCNVCGKKFRKYPSLLKHQSTHAKEKSYECEECGKEFRHISSLIAHQRMHTGEKPYECHQCGKAFSQRAHLTIHQRIHTGEKPYKCDDCGKDFSQRAHLTIHQRTHTGEKPYKCLECGKTFSHSSSLINHQRVHTGEKPYICNECGKTFSQSTHLLQHQKIHTGKKPYKCNECWKVFSQSTYLIRHQRIHSGEKCYKCNECGKAFAHSSTLIQHQTTHTGEKSYICNICGKAFSQSANLTQHHRTHTGEKPYKCSVCGKAFSQSVHLTQHQRIHNGEKPFKCNICGKAYRQGANLTQHQRIHTGEKPYKCNECGKAFIYSSSLNQHQRTHTGERPYKCNECDKDFSQRTCLIQHQRIHTGEKPYACRICGKTFTQSTNLIQHQRVHTGAKHRN

SEQ ID NO: 4437 - protein, 213 aa, Homo sapiens
  FAM177A1 (NCBI Accession: NP_001072987)
MDQEPVGGVERGEAVAASGAAAAAAFGESAGQMSNERGFENVELGVIGKKKKVPRRVIHFVSGETMEEYSTDEDEVDGLEKKDVLPTVDPTKLTWGPYLWFYMLRAATSTLSVCDFLGEKIASVLGISTPKYQYAIDEYYRMKKEEEEEEEENRMSEEAEKQYQQNKLQTDSIVQTDQPETVISSSFVNVNFEMEGDSEVIMESKQNPVSVPP

SEQ ID NO: 4438 - protein, 244 aa, Homo sapiens
  QDPR (NCBI Accession: NP_000311)
MAAAAAAGEARRVLVYGGRGALGSRCVQAFRARNWWVASVDVVENEEASASIIVKMTDSFTEQADQVTAEVGKLLGEEKVDAILCVAGGWAGGNAKSKSLFKNCDLMWKQSIWTSTISSHLATKHLKEGGLLTLAGAKAALDGTPGMIGYGMAKGAVHQLCQSLAGKNSGMPPGAAAIAVLPVTLDTPMNRKSMPEADFSSWTPLEFLVETFHDWITGKNRPSSGSLIQVVTTEGRTELTPAYF

SEQ ID NO: 4439 - protein, 194 aa, Homo sapiens
  BC031259.1_frag
MISRTPEVTCVVVDVSHEDPEVKFNWYVDGVEVHNAKTKPWEEQYNSTYHVVSVLTVVHQNWLNGKEYKCKVSNKGLQAPIEKTISKTKGQPREPQVYTLPPSQKMTKNQVTLTCLVKGFYPSDIAVEWESNGQPENNYKTTPPMLDSNGSFFLYSKLTVDKSRWQQGNVFSCSVMHEGLQNHYTQKSLSLSPG

SEQ ID NO: 4440 - protein, 264 aa, Homo sapiens
  METTL21C (NCBI Accession: NP_001010977)
MDVCLSSAQQPGRRGEGLSSPGGWLEAEKKGAPQKDSTGGVLEESNKIEPSLHSLQKFVPTDYASYTQEHYRFAGKEIVIQESIESYGAVVWPGAMALCQYLEEHAEELNFQDAKILEIGAGPGLVSIVASILGAQVTATDLPDVLGNLQYNLLKNTLQCTAHLPEVKELVWGEDLDKNFPKSAFYYDYVLASDVVYHHYFLDKLLTTMVYLSQPGTVLLWANKFRFSTDYEFLDKFKQVFDTTLLAEYPESSVKLFKGILKWD

SEQ ID NO: 4441 - protein, 344 aa, Homo sapiens
  HMBS (NCBI Accession: XP_005271589)
MRVIRVGTRKSQLARIQTDSVVATLKASYPGLQFEIIAMSTTGDKILDTALSKIGEKSLFTKELEHALEKNEVDLVVHSLKDLPTVLPPGFTIGAICKRENPHDAVVFHPKFVGKTLETLPEKSVVGTSSLRRAAQLQRKFPHLEFRSIRGNLNTRLRKLDEQQEFSAIILATAGLQRMGWHNRVGQILHPEECMYAVGQGALGVEVRAKDQDILDLVGVLHDPETLLRCIAERAFLRHLEGGCSVPVAVHTAMKDGQLYLTGGVWSLDGSDSIQETMQATIHVPAQHEDGPEDDPQLVGITARNIPRGPQLAAQNLGISLANLLLSKGAKNILDVARQLNDAH

SEQ ID NO: 4442 - protein, 717 aa, Homo sapiens [sequence omitted]

SEQ ID NO: 4443 - protein, 490 aa, Homo sapiens
  Q6ir13_frag
MFIGATFCAPRGASASRAYVPTAWKNLPATSETFPATSRVFPSTSHFQPASSNAFRGPSAASESPKSLPFALQDPYACVEALPAVPWVPYPDGNASSACKSVPAILMVAAAAPQASATAAEASKSSEPPRRPGKATRKKKHLEPKEDNCGHRLSSRDWRGPRTWGNPSHSDWEIQRAMQLLGDRESLYTPQGLNDWGCPNTSRMPRSLEGPSTSRDQEFCGDSGGSQTWMASEVPSVSRGSSAAQEDPDRESQPLSPLDERANALVQFLLVKDQAKVPVQLSEMVNVVIREYKDDSLDIINRANTKLECTFGCQLKEVDTKTHTYIIVNKMAYPQCNLLASYLERPKFSLLMVVLSLIFMKGYCIRENLLFSFLFQLGLDVQETSGLFRITKKLITSVFVRHRYLEYRQIPFTEPAEYELLWGPRAFLETNRVHILRFLAALYENQPQIWSCQYLDSLAELEYKDANAAAEESHDSDDDAHDPTSSPHPH

SEQ ID NO: 4444 - protein, 164 aa, Homo sapiens
  SRSF3 (NCBI Accession: NP_003008)
MHRDSCPLDCKVYVGNLGNNGNKTELERAFGYYGPLRSVWVARNPPGFAFVEFEDPRDAADAVRELDGRTLCGCRVRVELSNGEKRSRNRGPPPSWGRRPRDDYRRRSPPPRRRSPRRRSFSRSRSRSLSRDRRRERSLSRERNHKPSRSFSRSRSRSRSNERK

SEQ ID NO: 4445 - protein, 620 aa, Homo sapiens
  RANBP10 (NCBI Accession: NP_065901)
MAAATADPGAGNPQPGDSSGGGAGGGLPSPGEQELSRRLQRLYPAVNQQETPLPRSWSPKDKYNYIGLSQGNLRVHYKGHGKNHKDAASVRATHPIPAACGIYYFEVKIVSKGRDGYMGIGLSAQGVNMNRLPGWDKHSYGYHGDDGHSFCSSGTGQPYGPTFTTGDVIGCCVNLINGTCFYTKNGHSLGIAFTDLPANLYPTVGLQTPGEIVDANFGQQPFLFDIEDYMREWRAKVQGTVHCFPISARLGEWQAVLQNMVSSYLVHHGYCATATAFARMTETPIQEEQASIKNRQKIQKLVLEGRVGEAIETTQRFYPGLLEHNPNLLFMLKCRQFVEMVNGTDSEVRSLSSRSPKSQDSYPGSPSLSPRHGPSSSHMHNTGADSPSCSNGVASTKSKQNHSKYPAPSSSSSSSSSSSSSSPSSVNYSESNSTDSTKSQHHSSTSNQETSDSEMEMEAEHYPNGVLGSMSTRIVNGAYKHEDLQTDESSMDDRHPRRQLCGGNQAATERIILFGRELQALSEQLGREYGKNLAHTEMLQDAFSLLAYSDPWSCPVGQQLDPIQREPVCAALNSAILESQNLPKQPPLMLALGQASECLRLMARAGLGSCSFARVDDYLH

SEQ ID NO: 4446 - protein, 329 aa, Homo sapiens [sequence omitted]

SEQ ID NO: 4447 - protein, 624 aa, Homo sapiens
  UBQLN2 (NCBI Accession: NP_038472)
MAENGESSGPPRPSRGPAAAQGSAAAPAEPKIIKVTVKTPKEKEEFAVPENSSVQQFKEAISKRFKSQTDQLVLIFAGKILKDQDTLIQHGIHDGLTVHLVIKSQNRPQGQSTQPSNAAGTNTTSASTPRSNSTPISTNSNPFGLGSLGGLAGLSSLGLSSTNFSELQSQMQQQLMASPEMMIQIMENPFVQSMLSNPDLMRQLIMANPQMQQLIQRNPEISHLLNNPDIMRQTLEIARNPAMMQEMMRNQDLALSNLESIPGGYNALRRMYTDIQEPMLNAAQEQFGGNPFASVGSSSSSGEGTQPSRTENRDPLPNPWAPPPATQSSATTSTTTSTGSGSGNSSSNATGNTVAAANYVASIFSTPGMQSLLQQITENPQLIQNMLSAPYMRSMMQSLSQNPDLAAQMMLNSPLFTANPQLQEQMRPQLPAFLQQMQNPDTLSAMSNPRAMQALMQIQQGLQTLATEAPGLIPSFTPGVGVGVLGTAIGPVGPVTPIGPIGPIVPFTPIGPIGPIGPTGPAAPPGSTGSGGPTGPTVSSAAPSETTSPTSESGPNQQFIQQMVQALAGANAPQLPNPEVRFQQQLEQLNAMGFLNREANLQALIATGGDINAAIERLLGSQPS

SEQ ID NO: 4448 - protein, 655 aa, Homo sapiens
  UBQLN3 (NCBI Accession: NP_001334025)
MAKGGEALPQGSPAPVQDPHLIKVTVKTPKDKEDFSVTDTCTIQQLKEEISQRFKAHPDQLVLIFAGKILKDPDSLAQCGVRDGLTVHLVIKRQHRAMGNECPAASVPTQGPSPGSLPQPSSIYPADGPPAFSLGLLTGLSRLGLAYRGFPDQPSSLMRQHVSVPEFVTQLIDDPFIPGLLSNTGLVRQLVLDNPHMQQLIQHNPEIGHILNNPEIMRQTLEFLRNPAMMQEMIRSQDRVLSNLESIPGGYNVLCTMYTDIMDPMLNAVQEQFGGNPFATATTDNATTTTSQPSRMENCDPLPNPWTSTHGGSGSRQGRQDGDQDAPDIRNRFPNFLGIIRLYDYLQQLHENPQSLGTYLQGTASALSQSQEPPPSVNRVPPSSPSSQEPGSGQPLPEESVAIKGRSSCPAFLRYPTENSTGQGGDQDGAGKSSTGHSTNLPDLVSGLGDSANRVPFAPLSFSPTAAIPGIPEPPWLPSPAYPRSLRPDGMNPAPQLQDEIQPQLPLLMHLQAAMANPRALQALRQIEQGLQVLATEAPRLLLWFMPCLAGTGSVAGGIESREDPLMSEDPLPNPPPEVFPALDSAELGFLSPPFLHMLQDLVSTNPQQLQPEAHFQVQLEQLRSMGFLNREANLQALIATGGDVDAAVEKLRQS

SEQ ID NO: 4449 - protein, 166 aa, Homo sapiens
  AGR3 (NCBI Accession: NP_789783)
MMLHSALGLCLLLVTVSSNLAIAIKKEKRPPQTLSRGWGDDITWVQTYEEGLFYAQKSKKPLMVIHHLEDCQYSQALKKVFAQNEEIQEMAQNKFIMLNLMHETTDKNLSPDGQYVPRIMFVDPSLTVRADIAGRYSNRLYTYEPRDLPLLIENMKKALRLIQSEL

SEQ ID NO: 4450 - protein, 298 aa, Homo sapiens
  BIRC7 (NCBI Accession: NP_647478)
MGPKDSAKCLHRGPQPSHWAAGDGPTQERCGPRSLGSPVLGLDTCRAWDHVDGQILGQLRPLTEEEEEEGAGATLSRGPAFPGMGSEELRLASFYDWPLTAEVPPELLAAAGFFHTGHQDKVRCFFCYGGLQSWKRGDDPWTEHAKWFPSCQFLLRSKGRDFVHSVQETHSQLLGSWDPWEEPEDAAPVAPSVPASGYPELPTPRREVQSESAQEPGGVSPAEAQRAWWVLEPPGARDVEAQLRRLQEERTCKVCLDRAVSIVFVPCGHLVCAECAPGLQLCPICRAPVRSRVRTFLS

SEQ ID NO: 4451 - protein, 348 aa, Homo sapiens
  MTUS2 (NCBI Accession: NP_056048)
MGHCCCKPYNCLQCLDKTNESALVKEKELSIELANIRDEVAFHTAKCEKLQKEKEELERRFEDEVKRLGWQQQAELQELEERLQLQFEAEMARLQEEHGDQLLSIRCQHQEQVEDLTASHDAALLEMENNHTVAITILQDDHDHKVQELMSTHELEKKELEENFEKLRLSLQDQVDTLTFQSQSLRDRARRFEEALRKNTEEQLEIALAPYQHLEEDMKSLKQVLEMKNQQIHEQEKKILELEKLAEKNIILEEKIQVLQQQNEDLKARIDQNTVVTRQLSEENANLQEYVEKETQEKKRLSRTNEELLWKLQTGDPTSPIKLSPTSPVYRGSSSGPSSPARVSTTPR

SEQ ID NO: 4452 - protein, 475 aa, Homo sapiens
  ZNF296 (NCBI Accession: NP_660331)
MSRRKAGSAPRRVEPAPAANPDDEMEMQDLVIELKPEPDAQPQQAPRLGPFSPKEVSSAGRFGGEPHHSPGPMPAGAALLALGPRNPWTLWTPLTPNYPDRQPWTDKHPDLLTCGRCLQTFPLEAITAFMDHKKLGCQLFRGPSRGQGSEREELKALSCLRCGKQFTVAWKLLRHAQWDHGLSIYQTESEAPEAPLLGLAEVAAAVSAVVGPAAEAKSPRASGSGLTRRSPTCPVCKKTLSSFSNLKVHMRSHTGERPYACDQCPYACAQSSKLNRHKKTHRQVPPQSPLMADTSQEQASAAPPEPAVHAAAPTSTLPCSGGEGAGAAATAGVQEPGAPGSGAQAGPGGDTWGAITTEQRTDPANSQKASPKKMPKSGGKSRGPGGSCEFCGKHFTNSSNLTVHRRSHTGERPYTCEFCNYACAQSSKLNRHRRMHGMTPGSTRFECPHCHVPFGLRATLDKHLRQKHPEAAGEA

SEQ ID NO: 4453 - protein, 875 aa, Homo sapiens
  PDE5A (NCBI Accession: NP_001074)
MERAGPSFGQQRQQQQPQQQKQQQRDQDSVEAWLDGHWDFTFSYFVRKATREMVNAWFAERVHTIPVCKEGIRGHTESCSCPLQQSPRADNSVPGTPTRKISASEFDRPLRPIVVKDSEGTVSFLSDSEKKEQMPLTPPRFDHDEGDQCSRLLELVKDISSHLDVTALCHKIFLHIHGLISADRYSLFLVCEDSSNDKFLISRLFDVAEGSTLEEVSNNCIRLEWNKGIVGHVAALGEPLNIKDAYEDPRFNAEVDQITGYKTQSILCMPIKNHREEVVGVAQAINKKSGNGGTFTEKDEKDFAAYLAFCGIVLHNAQLYETSLLENKRNQVLLDLASLIFEEQQSLEVILKKIAATIISFMQVQKCTIFIVDEDCSDSFSSVFHMECEELEKSSDTLTREHDANKINYMYAQYVKNTMEPLNIPDVSKDKRFPWTTENTGNVNQQCIRSLLCTPIKNGKKNKVIGVCQLVNKMEENTGKVKPFNRNDEQFLEAFVIFCGLGIQNTQMYEAVERAMAKQMVTLEVLSYHASAAEEETRELQSLAAAVVPSAQTLKITDFSFSDFELSDLETALCTIRMFTDLNLVQNFRMKHEVLCRWILSVKKNYRKNVAYHNWRHAFNTAQCMFAALKAGKIQNKLTDLEILALLIAALSHDLDHRGVNNSYIQRSEHPLAQLYCHSIMEHHHFDQCLMILNSPGNQILSGLSIEEYKTTLKIIKQAILATDLALYIKRRGEFFELIRKNQFNLEDPHQKELFLAMLMTACDLSAITKPWPIQQRIAELVATEFFDQGDRERKELNIEPTDLMNREKKNKIPSMQVGFIDAICLQLYEALTHVSEDCFPLLDGCRKNRQKWQALAEQQEKMLINGESGQAKRN

SEQ ID NO: 4454 - protein, 419 aa, Homo sapiens [sequence omitted]

SEQ ID NO: 4455 - protein, 233 aa, Homo sapiens
  BCL2L1 (NCBI Accession: NP_001182)
MSQSNRELVVDFLSYKLSQKGYSWSQFSDVEENRTEAPEGTESEMETPSAINGNPSWHLADSPAVNGATGHSSSLDAREVIPMAAVKQALREAGDEFELRYRRAFSDLTSQLHITPGTAYQSFEQVVNELFRDGVNWGRIVAFFSFGGALCVESVDKEMQVLVSRIAAWMATYLNDHLEPWIQENGGWDTFVELYGNNAAAESRKGQERFNRWFLTGMTVAGVVLLGSLFSRK

SEQ ID NO: 4456 - protein, 273 aa, Homo sapiens
  ARGLU1 (NCBI Accession: NP_060481)
MGRSRSRSSSRSKHTKSSKHNKKRSRSRSRSRDKERVRKRSKSRESKRNRRRESRSRSRSTNTAVSRRERDRERASSPPDRIDIFGRTVSKRSSLDEKQKREEEEKKAEFERQRKIRQQEIEEKLIEEETARRVEELVAKRVEEELEKRKDEIEREVLRRVEEAKRIMEKQLLEELERQRQAELAAQKAREEEERAKREELERILEENNRKIAEAQAKLAEEQLRIVEEQRKIHEERMKLEQERQRQQKEEQKIILGKGKSRPKLSFSLKTQD

SEQ ID NO: 4457 - protein, 490 aa, Homo sapiens [sequence omitted]

SEQ ID NO: 4458 - protein, 377 aa, Homo sapiens
  PSMD4 (NCBI Accession: NP_002801)
MVLESTMVCVDNSEYMRNGDFLPTRLQAQQDAVNIVCHSKTRSNPENNVGLITLANDCEVLTTLTPDTGRILSKLHTVQPKGKITFCTGIRVAHLALKHRQGKNHKMRIIAFVGSPVEDNEKDLVKLAKRLKKEKVNVDIINFGEEEVNTEKLTAFVNTLNGKDGTGSHLVTVPPGPSLADALISSPILAGEGGAMLGLGASDFEFGVDPSADPELALALRVSMEEQRQRQEEEARRAAAASAAEAGIATTGTEDSDDALLKMTISQQEFGRTGLPDLSSMTEEEQIAYAMQMSLQGAEFGQAESADIDASSAMDTSEPAKEEDDYDVMQDPEFLQSVLENLPGVDPNNEAIRNAMGSLASQATKDGKKDKKEEDKK

SEQ ID NO: 4459 - protein, 276 aa, Homo sapiens
  SLA (NCBI Accession: NP_001039021)
MGNSMKSTPAPAERPLPNPEGLDSDFLAVLSDYPSPDISPPIFRRGEKLRVISDEGGWWKAISLSTGRESYIPGICVARVYHGWLFEGLGRDKAEELLQLPDTKVGSFMIRESETKKGFYSLSVRHRQVKHYRIFRLPNNWYYISPRLTFQCLEDLVNHYSEVADGLCCVLTTPCLTQSTAAPAVRASSSPVTLRQKTVDWRRVSRLQEDPEGTENPLGVDESLFSYGLRESIASYLSLTSEDNTSFDRKKKSISLMYGGSKRKSSFFSSPPYFED

SEQ ID NO: 4460 - protein, 227 aa, Homo sapiens
  NUDT21 (NCBI Accession: NP_008937)
MSVVPPNRSQTGWPRGVTQFGNKYIQQTKPLTLERTINLYPLTNYTFGTKEPLYEKDSSVAARFQRMREEFDKIGMRRTVEGVLIVHEHRLPHVLLLQLGTTFFKLPGGELNPGEDEVEGLKRLMTEILGRQDGVLQDWVIDDCIGNWWRPNFEPPQYPYIPAHITKPKEHKKLFLVQLQEKALFAVPKNYKLVAAPLFELYDNAPGYGPIISSLPQLLSRFNFIYN

SEQ ID NO: 4461 - protein, 576 aa, Homo sapiens
  ZNF431 (NCBI Accession: NP_597730)
MDDLKYGVYPLKEASGCPGAERNLLVYSYFEKETLTFRDVAIEFSLEEWECLNPAQQNLYMNVMLENYKNLVFLGVAVSKQDPVTCLEQEKEPWNMKRHEMVDEPPAMCSYFTKDLWPEQDIKDSFQQVILRRYGKCEHENLQLRKGSASVDEYKVHKEGYNELNQCLTTTQSKIFPCDKYVKVFHKFLNANRHKTRRTGKKPFKCKKCGKSFCMLLHLSQHKRIHIRENSYQCEECGKAFKWFSTLTRHKRIHTGEKPFKCEECGKAFKQSSTLTTHKIIHTGEKPYRCEECGKAFNRSSHLTTHKIIHTGEKPYKCEECGKAFNQSSTLSTHKFIHAGEKPYKCEECDKAFNRFSYLTKHKIIHTGEKSYKCEECGKGFNWSSTLTKHKRIHTGEKPYKCEVCGKAFNESSNLTTHKMIHTGEKPYKCEECGKAFNRSPQLTAHKIIHTGEKPYKCEECGKAFSQSSILTTHKRIHTGEKPYKCEECGKAFNRSSNLTKHKIIHTGEKSYKCEECGKAFNQSSTLTKHRKIHTRQKPYNCEECDNTFNQSSNLIKQNNSYWRETLQMSRMWESL

SEQ ID NO: 4462 - protein, 642 aa, Homo sapiens
  ZNF699 (NCBI Accession: NP_940937)
MEEERKTAELQKNRIQDSVVFEDVAVDFTQEEWALLDLAQRNLYRDVMLENFQNLASLGYPLHTPHLISQWEQEEDLQTVKRELIQGIFMGEHREGFETQLKTNESVASQDICGEKISNEQKIVRFKRNDSWFSSLHENQESCGIDYQNKSHERHLRNHMVENIYECYEENQDGQTFSQVPNLDSLKRNTEVKSCECHECGKAFVDHSSLKSHIRSHTGSKPYQCKECGKAFHFLACFKKHMKTPTEEKPYECKECTKAFSCSSFFRAHMKIHIGKTNYECKECGKGFSCSSSLTEHKRIHSGDKPYECKECGKAFSCSSSLSKHKRIHSGDKPYECKECGKAFSSSSHLIIHIRIHTGEKPYECKECGKAFSESSKLTVHGRTHTGEKPYKCKECGKAYNCPSSLSIHMRKHTGEKPYECLECGKAFYLPTSLNTHVKNQSREKPYECKECGKAFSCPSSFRAHVRDHTGKIQYECKECGKTFSRSSSLTEHLRTHSGEKPYECKECGKAFISSSHLTVHIRTHTGEKPYECKKCGKAFIYPSALRIHMRTHTGEKPYECKECGKAFRHSSYLTVHARMHTGEKPFECLECGKAFSCPSSFRRHVRSHTGEKPYECKECGKAFVCPAYFRRHVKTHTRENI

SEQ ID NO: 4463 - protein, 111 aa, Homo sapiens
  PAGE2 (NCBI Accession: NP_997222)
MSELLRARSQSSERGNDQESSQPVGSVIVQEPTEEKRQEEEPPTDNQGIAPSGEIENQAVPAFQGPDMEAFQQELALLKIEDEPGDGPDVREGIMPTFDLTKVLEAGDAQP

SEQ ID NO: 4464 - protein, 96 aa, Homo sapiens
  KRTAP12-3 (NCBI Accession: NP_941970)
MCHTSCSPACQPTCCIHSPCQASCYVPVSCQSSVCMPVSCTRIVCVAPSCQPSVCVPVSCRPIIYVTPSCQSSGCCQPPCTTALCRPISCSTPSCC

SEQ ID NO: 4465 - protein, 434 aa, Homo sapiens
  ENO2 (NCBI Accession: NP_001966)
MSIEKIWAREILDSRGNPTVEVDLYTAKGLFRAAVPSGASTGIYEALELRDGDKQRYLGKGVLKAVDHINSTIAPALISSGLSVVEQEKLDNLMLELDGTENKSKFGANAILGVSLAVCKAGAAERELPLYRHIAQLAGNSDLILPVPAFNVINGGSHAGNKLAMQEFMILPVGAESFRDAMRLGAEVYHTLKGVIKDKYGKDATNVGDEGGFAPNILENSEALELVKEAIDKAGYTEKIVIGMDVAASEFYRDGKYDLDFKSPTDPSRYITGDQLGALYQDFVRDYPVVSIEDPFDQDDWAAWSKFTANVGIQIVGDDLTVTNPKRIERAVEEKACNCLLLKVNQIGSVTEAIQACKLAQENGWGVMVSHRSGETEDTFIADLVVGLCTGQIKTGAPCRSERLAKYNQLMRIEEELGDEARFAGHNFRNPSVL

SEQ ID NO: 4466 - protein, 251 aa, Homo sapiens
  C11orf68 (NCBI Accession: NP_001129107)
MEPGEELEEEGSPGGREDGFTAEHLAAEAMAADMDPWLVFDARTTPATELDAWLAKYPPSQVTRYGDPGSPNSEPVGWIAVYGQGYSPNSGDVQGLQAAWEALQTSGRPITPGTLRQLAITHHVLSGKWLMHLAPGFKLDHAWAGIARAVVEGRLQVAKVSPRAKEGGRQVICVYTDDFTDRLGVLEADSAIRAAGIKCLLTYKPDVYTYLGIYRANRWHLCPTLYESRFQLGGSARGSRVLDRANNVELT

SEQ ID NO: 4467 - protein, 900 aa, Homo sapiens
  MARS (NCBI Accession: NP_004981)
MRLFVSDGVPGCLPVLAAAGRARGRAEVLISTVGPEDCVVPFLTRPKVPVLQLDSGNYLFSTSAICRYFFLLSGWEQDDLTNQWLEWEATELQPALSAALYYLVVQGKKGEDVLGSVRRALTHIDHSLSRQNCPFLAGETESLADIVLWGALYPLLQDPAYLPEELSALHSWFQTLSTQEPCQRAAETVLKQQGVLALRPYLQKQPQPSPAEGRAVTNEPEEEELATLSEEEIAMAVTAWEKGLESLPPLRPQQNPVLPVAGERNVLITSALPYVNNVPHLGNIIGCVLSADVFARYSRLRQWNTLYLCGTDEYGTATETKALEEGLTPQEICDKYHIIHADIYRWFNISFDIFGRTTTPQQTKITQDIFQQLLKRGFVLQDTVEQLRCEHCARFLADRFVEGVCPFCGYEEARGDQCDKCGKLINAVELKKPQCKVCRSCPVVQSSQHLFLDLPKLEKRLEEWLGRTLPGSDWTPNAQFITRSWLRDGLKPRCITRDLKWGTPVPLEGFEDKVFYVWFDATIGYLSITANYTDQWERWWKNPEQVDLYQFMAKDNVPFHSLVFPCSALGAEDNYTLVSHLIATEYLNYEDGKFSKSRGVGVFGDMAQDTGIPADIWRFYLLYIRPEGQDSAFSWTDLLLKNNSELLNNLGNFINRAGMFVSKFFGGYVPEMVLTPDDQRLLAHVTLELQHYHQLLEKVRIRDALRSILTISRHGNQYIQVNEPWKRIKGSEADRQRAGTVTGLAVNIAALLSVMLQPYMPTVSATIQAQLQLPPPACSILLTNFLCTLPAGHQIGTVSPLFQKLENDQIESLRQRFGGGQAKTSPKPAVVETVTTAKPQQIQALMDEVTKQGNIVRELKAQKADKNEVAAEVAKLLDLKKQLAVAEGKPPEAPKGKKKK

SEQ ID NO: 4468 - protein, 376 aa, Homo sapiens
  SERPINB6 (NCBI Accession: NP_001182220)
MDVLAEANGTFALNLLKTLGKDNSKNVFFSPMSMSCALAMVYMGAKGNTAAQMAQILSFNKSGGGGDIHQGFQSLLTEVNKTGTQYLLRVANRLFGEKSCDFLSSFRDSCQKFYQAEMEELDFISAVEKSRKHINTWVAEKTEGKIAELLSPGSVDPLTRLVLVNAVYFRGNWDEQFDKENTEERLFKVSKNEEKPVQMMFKQSTFKKTYIGEIFTQILVLPYVGKELNMIIMLPDETTDLRTVEKELTYEKFVEWTRLDMMDEEEVEVSLPRFKLEESYDMESVLRNLGMTDAFELGKADFSGMSQTDLSLSKVVHKSFVEVNEEGTEAAAATAAIMMMRCARFVPRFCADHPFLFFIQHSKTNGILFCGRFSSP

SEQ ID NO: 4469 - protein, 273 aa, Homo sapiens
  ERP27 (NCBI Accession: NP_689534)
MEAAPSRFMFLLFLLTCELAAEVAAEVEKSSDGPGAAQEPTWLTDVPAAMEFIAATEVAVIGFFQDLEIPAVPILHSMVQKFPGVSFGISTDSEVLTHYNITGNTICLFRLVDNEQLNLEDEDIESIDATKLSRFIEINSLHMVTEYNPVTVIGLFNSVIQIHLLLIMNKASPEYEENMHRYQKAAKLFQGKILFILVDSGMKENGKVISFFKLKESQLPALAIYQTLDDEWDTLPTAEVSVEHVQNFCDGFLSGKLLKENRESEGKTPKVEL

SEQ ID NO: 4470 - protein, 99 aa, Homo sapiens
  DPY30 (NCBI Accession: NP_001308138)
MEPEQMLEGQTQVAENPHSEYGLTDNVERIVENEKINAEKSSKQKVDLQSLPTRAYLDQTVVPILLQGLAVLAKERPPNPIEFLASYLLKNKAQFEDRN

SEQ ID NO: 4471 - protein, 230 aa, Homo sapiens
  ROPN1L (NCBI Accession: NP_001188395)
MPLPDTMFCAQQIHIPPELPDILKQFTKAAIRTQPADVLRWSAGYFSALSRGDPLPVKDRMEMPTATQKTDTGLTQGLLKVLHKQCHHKRYVELTDLEQKWKNLCLPKEKFKALLQLDPCENKIKWINFLALGCSMLGGSLNTALKHLCEILTDDREGGPARIPFKTFSYVYRYLARLDSDVSPLETESYLASLKENIDARKNGMIGLSDFFFPKRKLLESIENSEDVGH

SEQ ID NO: 4472 - protein, 378 aa, Homo sapiens
  BTBD8 (NCBI Accession: NP_899065)
MARCGEGSAAPMVLLGSAGVCSKGLQRKGPCERRRLKATVSEQLSQDLLRLLREEFHTDVTFSVGCTLFKAHKAVLLARVPDFYFHTIGQTSNSLTNQEPIAVENVEALEFRTFLQIIYSSNRNIKNYEEEILRKKIMEIGISQKQLDISFPKCENSSDCSLQKHEIPEDISDRDDDFISNDNYDLEPASELGEDLLKLYVKPGCPDIDIFVDGKRFKAHRAILSARSSYFAAMLSGCWAESSQEYVTLQGISHVELNVMMHFIYGGTLDIPDKTNVGQILNMADMYGLEGLKEVAIYILRRDYCNFFQKPVPRTLTSILECLIIAHSVGVESLFADCMKWIVKHFARFWSERSFANIPPEIQKSCLNMLIQSLVNIT

SEQ ID NO: 4473 - protein, 348 aa, Homo sapiens
  NCF4 (NCBI Accession: NP_038202)
MAVAQQLRAESDFEQLPDDVAISANIADIEEKRGFTSHFVFVIEVKTKGGSKYLIYRRYRQFHALQSKLEERFGPDSKSSALACTLPTLPAKVYVGVKQEIAEMRIPALNAYMKSLLSLPVWVLMDEDVRIFFYQSPYDSEQVPQALRRLRPRTRKVKSVSPQGNSVDRMAAPRAEALFDFTGNSKLELNFKAGDVIFLLSRINKDWLEGTVRGATGIFPLSFVKILKDFPEEDDPTNWLRCYYYEDTISTIKSVAWEGGACPAFLPSLRPPPLTSPSHGSLSHSKAPSGSQMSHNAVTSHQRPGWPGQPHSPFPHPTPHFQPDASLLQPVTPLGTSRWRKISAALPY

SEQ ID NO: 4474 - protein, 519 aa, Homo sapiens
  TCP11L2 (NCBI Accession: XP_005268824)
MPFNGEKQCVGEDQPSDSDSSRFSESMASLSDYECSRQSFASDSSSKSSSPASTSPPRVVTFDEVMATARNLSNLTLAHEIAVNENFQLKQEALPEKSLAGRVKHIVHQAFWDVLDSELNADPPEFEHAIKLFEEIREILLSFLTPGGNRLRNQICEVLDTDLIRQQAEHSAVDIQGLANYVISTMGKLCAPVRDNDIRELKATGNIVEVLRQIFHVLDLMQMDMANFTIMSLRPHLQRQLVEYERTKFQEILEETPSALDQTTEWIKESVNEELFSLSESALTPGAENTSKPSLSPTLVLNNSYLKLLQWDYQKKELPETLMTDGARLQELTEKLNQLKIIACLSLITNNMVGAITGGLPELASRLTRISAVLLEGMNKETFNLKEVLNSIGIQTCVEVNKTLMERGLPTLNAEIQANLIGQFSSIEEEDNPIWSLIDKRIKLYMRRLLCLPSPQKCMPPMPGGLAVIQQELEALGSQYANIVNLNKQVYGPFYANILRKLLFNEEAMGKVDASPPTN

SEQ ID NO: 4475 - protein, 199 aa, Homo sapiens
  PLCB2 (NCBI Accession: NP_001271228)
MSLLNPVLLPPKVKAYLSQGERFIKWDDETTVASPVILRVDPKGYYLYWTYQSKEMEFLDITSIRDTRFGKFAKMPKSQKLRDVFNMDFPDNSFLLKTLTVVSGPDMVDLTFHNFVSYKENVGKAWAEDVLALVKHPLTANASRSTFLDKILVKLKMQLNSEGKIPVKNFFQMFPADRKRVEAALSACHLPKGKPGGAR

SEQ ID NO: 4476 - protein, 327 aa, Homo sapiens
  MAPRE2 (NCBI Accession: NP_055083)
MPGPTQTLSPNGENNNDIIQDNNGTIIPFRKHTVRGERSYSWGMAVNVYSTSITQETMSRHDIIAWVNDIVSLNYTKVEQLCSGAAYCQFMDMLFPGCISLKKVKFQAKLEHEYIHNFKLLQASFKRMNVDKVIPVEKLVKGRFQDNLDFIQWFKKFYDANYDGKEYDPVEARQGQDAIPPPDPGEQIFNLPKKSHHANSPTAGAAKSSPAAKPGSTPSRPSSAKRASSSGSASKSDKDLETQVIQLNEQVHSLKLALEGVEKERDFYFGKLREIELLCQEHGQENDDLVQRLMDILYASEEHEGHTEEPEAEEQAHEQQPPQQEEY

SEQ ID NO: 4477 - protein, 631 aa, Homo sapiens
  DDX53 (NCBI Accession: NP_874358)
MSHWAPEWKRAEANPRDLGASWDVRGSRGSGWSGPFGHQGPRAAGSREPPLCFKIKNNMVGVVIGYSGSKIKDLQHSTNTKIQIINGESEAKVRIFGNREMKAKAKAAIETLIRKQESYNSESSVDNAASQTPIGRNLGRNDIVGEAEPLSNWDRIRAAVVECEKRKWADLPPVKKNFYIESKATSCMSEMQVINWRKENFNITCDDLKSGEKRLIPKPTCRFKDAFQQYPDLLKSIIRVGILKPTPIQSQAWPIILQGIDLIVVAQTGTGKTLSYLMPGFIHLDSQPISREQRNGPGMLVLTPTRELALHVEAECSKYSYKGLKSICIYGGRNRNGQIEDISKGVDIIIATPGRLNDLQMNNSVNLRSITYLVIDEADKMLDMEFEPQIRKILLDVRPDRQTVMTSATWPDTVRQLALSYLKDPMIVYVGNLNLVAVNTVKQNIIVTTEKEKRALTQEFVENMSPNDKVIMFVSQKHIADDLSSDFNIQGISAESLHGNSEQSDQERAVEDFKSGNIKILITTDIVSRGLDLNDVTHVYNYDFPRNIDVYVHRVGYIGRTGKTGTSVTLITQRDSKMAGELIKILDRANQSVPEDLVVMAEQYKLNQQKRHRETRSREPGQRRKEFYFLS

SEQ ID NO: 4478 - protein, 636 aa, Homo sapiens
  IL27RA (NCBI Accession: NP_004834)
MRGGRGAPFWLWPLPKLALLPLLWVLFQRTRPQGSAGPLQCYGVGPLGDLNCSWEPLGDLGAPSELHLQSQKYRSNKTQTVAVAAGRSWVAIPREQLTMSDKLLVWGTKAGQPLWPPVFVNLETQMKPNAPRLGPDVDFSEDDPLEATVHWAPPTWPSHKVLICQFHYRRCQEAAWTLLEPELKTIPLTPVEIQDLELATGYKVYGRCRMEKEEDLWGEWSPILSFQTPPSAPKDVWVSGNLCGTPGGEEPLLLWKAPGPCVQVSYKVWFWVGGRELSPEGITCCCSLIPSGAEWARVSAVNATSWEPLTNLSLVCLDSASAPRSVAVSSIAGSTELLVTWQPGPGEPLEHVVDWARDGDPLEKLNWVRLPPGNLSALLPGNFTVGVPYRITVTAVSASGLASASSVWGFREELAPLVGPTLWRLQDAPPGTPAIAWGEVPRHQLRGHLTHYTLCAQSGTSPSVCMNVSGNTQSVTLPDLPWGPCELWVTASTIAGQGPPGPILRLHLPDNTLRWKVLPGILFLWGLFLLGCGLSLATSGRCYHLRHKVLPRWVWEKVPDPANSSSGQPHMEQVPEAQPLGDLPILEVEEMEPPPVMESSQPAQATAPLDSGYEKHFLPTPEELGLLGPPRPQVLA

SEQ ID NO: 4479 - protein, 369 aa, Homo sapiens
  DHPS (NCBI Accession: NP_001193903)
MEGSLEREAPAGALAAVLKHSSTLPPESTQVRGYDFNRGVNYRALLEAFGTTGFQATNFGRAVQQVNAMIEKKLEPLSQDEDQHADLTQSRRPLTSCTIFLGYTSNLISSGIRETIRYLVQHNMVDVLVTTAGGVEEDLIKCLAPTYLGEFSLRGKELRENGINRIGNLLVPNENYCKFEDWLMPILDQMVMEQNTEGVKWTPSKMIARLGKEINNPESVYYWAQKNHIPVFSPALTDGSLGDMIFFHSYKNPGLVLDIVEDLRLINTQAIFAKCTGMIILGGGVVKHHIANANLMRNGADYAVYINTAQEFDGSDSGARPDEAVSWGKIRVDAQPVKVYADASLVFPLLVAETFAQKMDAFMHEKNED

SEQ ID NO: 4480 - protein, 680 aa, Homo sapiens
  HEATR3 (NCBI Accession: NP_891552)
MGKSRTKRFKRPQFSPTGDCQAEAAAAANGTGGEEDDGPAAELLEKLQHPSAEVRECACAGLARLVQQRPALPGLARRDAVRRLGPLLLDPSLAVRETAAGALRNLSACGGFEVCDDMVTKDIMTPLVALLKECSAGLDSNEMSLQEKKDQNRNSIENIANETVNVLWNICECSSRAVSIFNKEGCLEIVLKYLSRFPTNVDLAISVAYCLQTVTEDNPELLKSFSATALNMLESALLSPVSSMESLLLKTLVAGTIWNLKDIIPCKSQAEIINALLKILSEVLGMDAGEMVIQMKEAETQRLKTAAEAEEILENTNGDDLIEDDEMEGISHKRRVRRKTFVSDLLPPTDKELRETIALLTAQQTALEIIVNMCCNEDPSDDEWEELSSSDESDAFMENSFSECGGQLFSPLCLSHEVHTALTNYLIPKKIFEKTAFPNSIAVDLCSRNPTWKPLIRKMNTIQCRALFCLQSLVSLLDVEHLGGAAALQTLAQHLSQLLFSQPDFAKHVDFLEAISSALRALLQTMASKNISQCMTPDQLMTLCKAGIHSSNVGVRVNVVSILGITGSVLAKEDGTLETLKNIGCFLLEVTTKDPSLVVAGEALDALFDVFADGKEAERASIQIKLLSALKEFQPVFKMKIRKEGRGNYSTDQLCVLDNVKMNLRRFIAYQETVEKRLTS

SEQ ID NO: 4481 - protein, 731 aa, Homo sapiens [sequence omitted]

SEQ ID NO: 4482 - protein, 40 aa, Homo sapiens
  WDR3 (NCBI Accession: NP_006775)
MGLTKQYLRYVASAVFGVIGSQKGLASQASSSFVFFATEF

SEQ ID NO: 4483 - protein, 925 aa, Homo sapiens
  DDX58 (NCBI Accession: NP_055129)
MTTEQRRSLQAFQDYIRKTLDPTYILSYMAPWFREEEVQYIQAEKNNKGPMEAATLFLKFLLELQEEGWFRGFLDALDHAGYSGLYEAIESWDFKKIEKLEEYRLLLKRLQPEFKTRIIPTDIISDLSECLINQECEEILQICSTKGMMAGAEKLVECLLRSDKENWPKTLKLALEKERNKFSELWIVEKGIKDVETEDLEDKMETSDIQIFYQEDPECQNLSENSCPPSEVSDTNLYSPFKPRNYQLELALPAMKGKNTIICAPTGCGKTFVSLLICEHHLKKFPQGQKGKVVFFANQIPVYEQQKSVFSKYFERHGYRVTGISGATAENVPVEQIVENNDIIILTPQILVNNLKKGTIPSLSIFTLMIFDECHNTSKQHPYNMIMFNYLDQKLGGSSGPLPQVIGLTASVGVGDAKNTDEALDYICKLCASLDASVIATVKHNLEELEQVVYKPQKFFRKVESRISDKFKYIIAQLMRDTESLAKRICKDLENLSQIQNREFGTQKYEQWIVTVQKACMVFQMPDKDEESRICKALFLYTSHLRKYNDALIISEHARMKDALDYLKDFFSNVRAAGFDEIEQDLTQRFEEKLQELESVSRDPSNENPKLEDLCFILQEEYHLNPETITILFVKTRALVDALKNWIEGNPKLSFLKPGILTGRGKTNQNTGMTLPAQKCILDAFKASGDHNILIATSVADEGIDIAQCNLVILYEYVGNVIKMIQTRGRGRARGSKCFLLTSNAGVIEKEQINMYKEKMMNDSILRLQTWDEAVFREKILHIQTHEKFIRDSQEKPKPVPDKENKKLLCRKCKALACYTADVRVIEECHYTVLGDAFKECFVSRPHPKPKQFSSFEKRAKIFCARQNCSHDWGIHVKYKTFEIPVIKIESFVVEDIATGVQTLYSKWKDFHFEKIPFDPAEMSK

SEQ ID NO: 4484 - protein, 303 aa, Homo sapiens
  NUDT22 (NCBI Accession: NP_001122084)
MDPEVTLLLQCPGGGLPQEQIQAELSPAHDRRPLPGGDEAITAIWETRLKAQPWLFDAPKFRLHSATLAPIGSRGPQLLLRLGLTSYRDFLGTNWSSSAAWLRQQGATDWGDTQAYLADPLGVGAALATADDFLVFLRRSRQVAEAPGLVDVPGGHPEPQALCPGGSPQHQDLAGQLVVHELFSSVLQEICDEVNLPLLTLSQPLLLGIARNETSAGRASAEFYVQCSLTSEQVRKHYLSGGPEAHESTGIFFVETQNVRRLPETEMWAELCPSAKGAIILYNRVQGSPTGAALGSPALLPPL

SEQ ID NO: 4485 - protein, 217 aa, Homo sapiens
  GCA (NCBI Accession: NP_036330)
MAYPGYGGGFGNFSIQVPGMQMGQPVPETGPAILLDGYSGPAYSDTYSSAGDSVYTYFSAVAGQDGEVDAEELQRCLTQSGINGTYSPFSLETCRIMIAMLDRDHTGKMGFNAFKELWAALNAWKENFMTVDQDGSGTVEHHELRQAIGLMGYRLSPQTLTTIVKRYSKNGRIFFDDYVACCVKLRALTDFFRKRDHLQQGSANFIYDDFLQGTMAI

SEQ ID NO: 4486 - protein, 223 aa, Homo sapiens
  POLR3G (NCBI Accession: NP_001357280)
MAGNKGRGRAAYTFNIEAVGFSKGEKLPDVVLKPPPLFPDTDYKPVPLKTGEGEEYMLALKQELRETMKRMPYFIETPEERQDIERYSKRYMKVYKEEWIPDWRRLPREMMPRNKCKKAGPKPKKAKDAGKGTPLTNTEDVLKKMEELEKRGDGEKSDEENEEKEGSKEKSKEGDDDDDDDAAEQEEYDEEEQEEENDYINSYFEDGDDFGADSDDNMDEATY

SEQ ID NO: 4487 - protein, 522 aa, Homo sapiens
  SNX1 (NCBI Accession: NP_003090)
MASGGGGCSASERLPPPFPGLEPESEGAAGGSEPEAGDSDTEGEDIFTGAAVVSKHQSPKITTSLLPINNGSKENGIHEEQDQEPQDLFADATVELSLDSTQNNQKKVLAKTLISLPPQEATNSSKPQPTYEELEEEEQEDQFDLTVGITDPEKIGDGMNAYVAYKVTTQTSLPLFRSKQFAVKRRFSDFLGLYEKLSEKHSQNGFIVPPPPEKSLIGMTKVKVGKEDSSSAEFLEKRRAALERYLQRIVNHPTMLQDPDVREFLEKEELPRAVGTQTLSGAGLLKMFNKATDAVSKMTIKMNESDIWFEEKLQEVECEEQRLRKLHAVVETLVNHRKELALNTAQFAKSLAMLGSSEDNTALSRALSQLAEVEEKIEQLHQEQANNDFFLLAELLSDYIRLLAIVRAAFDQRMKTWQRWQDAQATLQKKREAEARLLWANKPDKLQQAKDEILEWESRVTQYERDFERISTVVRKEVIRFEKEKSKDFKNHVIKYLETLLYSQQQLAKYWEAFLPEAKAIS

SEQ ID NO: 4488 - protein, 154 aa, Homo sapiens [sequence omitted]

SEQ ID NO: 4489 - protein, 534 aa, Homo sapiens
  PSMD3 (NCBI Accession: NP_002800)
MKQEGSARRRGADKAKPPPGGGEQEPPPPPAPQDVEMKEEAATGGGSTGEADGKTAAAAAEHSQRELDTVTLEDIKEHVKQLEKAVSGKEPRFVLRALRMLPSTSRRLNHYVLYKAVQGFFTSNNATRDFLLPFLEEPMDTEADLQFRPRTGKAASTPLLPEVEAYLQLLVVIFMMNSKRYKEAQKISDDLMQKISTQNRRALDLVAAKCYYYHARVYEFLDKLDVVRSFLHARLRTATLRHDADGQATLLNLLLRNYLHYSLYDQAEKLVSKSVFPEQANNNEWARYLYYTGRIKAIQLEYSEARRTMTNALRKAPQHTAVGFKQTVHKLLIVVELLLGEIPDRLQFRQPSLKRSLMPYFLLTQAVRTGNLAKFNQVLDQFGEKFQADGTYTLIIRLRHNVIKTGVRMISLSYSRISLADIAQKLQLDSPEDAEFIVAKAIRDGVIEASINHEKGYVQSKEMIDIYSTREPQLAFHQRISFCLDIHNMSVKAMRFPPKSYNKDLESAEERREREQQDLEFAKEMAEDDDDSFP

SEQ ID NO: 4490 - protein, 303 aa, Homo sapiens
  CRKL (NCBI Accession: NP_005198)
MSSARFDSSDRSAWYMGPVSRQEAQTRLQGQRHGMFLVRDSSTCPGDYVLSVSENSRVSHYIINSLPNRRFKIGDQEFDHLPALLEFYKIHYLDTTTLIEPAPRYPSPPMGSVSAPNLPTAEDNLEYVRTLYDFPGNDAEDLPFKKGEILVIIEKPEEQWWSARNKDGRVGMIPVPYVEKLVRSSPHGKHGNRNSNSYGIPEPAHAYAQPQTTTPLPAVSGSPGAAITPLPSTQNGPVFAKAIQKRVPCAYDKTALALEVGDIVKVTRMNINGQWEGEVNGRKGLFPFTHVKIFDPQNPDENE

SEQ ID NO: 4491 - protein, 296 aa, Homo sapiens
  FBXO2 (NCBI Accession: NP_036300)
MDGDGDPESVGQPEEASPEEQPEEASAEEERPEDQQEEEAAAAAAYLDELPEPLLLRVLAALPAAELVQACRLVCLRWKELVDGAPLWLLKCQQEGLVPEGGVEEERDHWQQFYFLSKRRRNLLRNPCGEEDLEGWCDVEHGGDGWRVEELPGDSGVEFTHDESVKKYFASSFEWCRKAQVIDLQAEGYWEELLDTTQPAIVVKDWYSGRSDAGCLYELTVKLLSEHENVLAEFSSGQVAVPQDSDGGGWMEISHTFTDYGPGVRFVRFEHGGQDSVYWKGWFGARVTNSSVWVEP

SEQ ID NO: 4492 - protein, 451 aa, Homo sapiens
  TUBG1 (NCBI Accession: NP_001061)
MPREIITLQLGQCGNQIGFEFWKQLCAEHGISPEGIVEEFATEGTDRKDVFFYQADDEHYIPRAVLLDLEPRVIHSILNSPYAKLYNPENIYLSEHGGGAGNNWASGFSQGEKIHEDIFDIIDREADGSDSLEGFVLCHSIAGGTGSGLGSYLLERLNDRYPKKLVQTYSVFPNQDEMSDVVVQPYNSLLTLKRLTQNADCVVVLDNTALNRIATDRLHIQNPSFSQINQLVSTIMSASTTTLRYPGYMNNDLIGLIASLIPTPRLHFLMTGYTPLTTDQSVASVRKTTVLDVMRRLLQPKNVMVSTGRDRQTNHCYIAILNIIQGEVDPTQVHKSLQRIRERKLANFIPWGPASIQVALSRKSPYLPSAHRVSGLMMANHTSISSLFERTCRQYDKLRKREAFLEQFRKEDMFKDNFDEMDTSREIVQQLIDEYHAATRPDYISWGTQEQ

SEQ ID NO: 4493 - protein, 758 aa, Homo sapiens
  OXR1 (NCBI Accession: NP_060472)
MSFQKPKGTIEYTVESRDSLNSIALKFDTTPNELVQLNKLFSRAVVTGQVLYVPDPEYVSSVESSPSLSPVSPLSPTSSEAEFDKTTNPDVHPTEATPSSTFTGIRPARVVSSTSEEEEAFTEKFLKINCKYITSGKGTVSGVLLVTPNNIMFDPHKNDPLVQENGCEEYGIMCPMEEVMSAAMYKEILDSKIKESLPIDIDQLSGRDFCHSKKMTGSNTEEIDSRIRDAGNDSASTAPRSTEESLSEDVFTESELSPIREELVSSDELRQDKSSGASSESVQTVNQAEVESLTVKSESTGTPGHLRSDTEHSTNEVGTLCHKTDLNNLEMAIKEDQIADNFQGISGPKEDSTSIKGNSDQDSFLHENSLHQEESQKENMPCGETAEFKQKQSVNKGKQGKEQNQDSQTEAEELRKLWKTHTMQQTKQQRENIQQVSQKEAKHKITSADGHIESSALLKEKQRHRLHKFLCLRVGKPMRKTFVSQASATMQQYAQRDKKHEYWFAVPQERTDHLYAFFIQWSPEIYAEDTGEYTREPGFIVVKKIEESETIEDSSNQAAAREWEITTREDINSKQVATVKADLESESFRPNLSDPSELLLPDQIEKLTKHLPPRTIGYPWTLVYGTGKHGTSLKTLYRTMTGLDTPVLMVIKDSDGQVFGALASEPLKVSDGFYGTGETFVFTFCPEFEVFKWTGDNMFFIKGDMDSLAFGGGGGEFALWLDGDLYHGRSHSCKTFGNRTLSKKEDFFIQDIEIWAFE

SEQ ID NO: 4494 - protein, 165 aa, Homo sapiens
  ANKRD20A5P (NCBI Accession: NR_040113)
MKLFGFRSRRGQTVLGSIDHLYTGSGYRIRYSELQKIHKAAVKGDAAEMERCLARRSGDLDALDKQHRTALHLACASGHVKVVTLLVNRKCQIDIYDKENRTPLIQAVHCQEEACAVILLEHGANPNLKDIYGNTALHYAVYSESTSLAEKLLFHGENIEALDKV

SEQ ID NO: 4495 - protein, 757 aa, Homo sapiens
  KIRREL (NCBI Accession: NP_001164456)
MLSLLVWILTLSDTFSQGTQTRFSQEPADQTVVAGQRAVLPCVLLNYSGIVQWTKDGLALGMGQGLKAWPRYRVVGSADAGQYNLEITDAELSDDASYECQATEAALRSRRAKLTVLIPPEDTRIDGGPVILLQAGTPHNLTCRAFNAKPAATIIWFRDGTQQEGAVASTELLKDGKRETTVSQLLINPTDLDIGRVFTCRSMNEAIPSGKETSIELDVHHPPTVTLSIEPQTVQEGERVVFTCQATANPEILGYRWAKGGFLIEDAHESRYETNVDYSFFTEPVSCEVHNKVGSTNVSTLVNVHFAPRIVVDPKPTTTDIGSDVTLTCVWVGNPPLTLTWTKKDSNMVLSNSNQLLLKSVTQADAGTYTCRAIVPRIGVAEREVPLYVNGPPIISSEAVQYAVRGDGGKVECFIGSTPPPDRIAWAWKENFLEVGTLERYTVERTNSGSGVLSTLTINNVMEADFQTHYNCTAWNSFGPGTAIIQLEEREVLPVGIIAGATIGASILLIFFFIALVFFLYRRRKGSRKDVTLRKLDIKVETVNREPLTMHSDREDDTASVSTATRVMKAIYSSFKDDVDLKQDLRCDTIDTREEYEMKDPTNGYYNVRAHEDRPSSRAVLYADYRAPGPARFDGRPSSRLSHSSGYAQLNTYSRGPASDYGPEPTPPGPAAPAGTDTTSQLSYENYEKFNSHPFPGAAGYPTYRLGYPQAPPSGLERTPYEAYDPIGKYATATRFSYTSQHSDYGQRFQQRMQTHV

SEQ ID NO: 4496 - protein, 1035 aa, Homo sapiens
  GIGYF1 (NCBI Accession: XP_005250589)
MAAETLNFGPEWLRALSGGGSVASPPPSPAMPKYKLADYRYGREEMLALYVKENKVPEELQDKEFAAVLQDEPLQPLALEPLTEEEQRNFSLSVNSVAVLRLMGKGAGPPLAGTSRGRGSTRSRGRGRGDSCFYQRSIEEGDGAFGRSPREIQRSQSWDDRGERRFEKSARRDGARCGFEEGGAGPRKEHARSDSENWRSLREEQEEEEEGSWRLGAGPRRDGDRWRSASPDGGPRSAGWREHGERRRKFEFDLRGDRGGCGEEEGRGGGGSSHLRRCRAPEGFEEDKDGLPEWCLDDEDEEMGTFDASGAFLPLKKGPKEPIPEEQELDFQGLEEEEEPSEGLEEEGPEAGGKELTPLPPQEEKSSSPSPLPTLGPLWGTNGDGDETAEKEPPAAEDDIRGIQLSPGVGSSAGPPGDLEDDEGLKHLQQEAEKLVASLQDSSLEEEQFTAAMQTQGLRHSAAATALPLSHGAARKWFYKDPQGEIQGPFTTQEMAEWFQAGYFSMSLLVKRGCDEGFQPLGEVIKMWGRVPFAPGPSPPPLLGNMDQERLKKQQELAAAALYQQLQHQQFLQLVSSRQLPQCALREKAALGDLTPPPPPPPQQQQQQLTAFLQQLQALKPPRGGDQNLLPTMSRSLSVPDSGRLWDVHTSASSQSGGEASLWDIPINSSTQGPILEQLQLQHKFQERREVELRAKREEEERKRREEKRRQQQQEEQKRRQEEEELFRRKHVRQQELLLKLLQQQQAVPVPPAPSSPPPLWAGLAKQGLSMKTLLELQLEGERQLHKQPPPREPARAQAPNHRVQLGGLGTAPLNQWVSEAGPLWGGPDKSGGGSSGLGLWEDTPKSGGSLVRGLGLKNSRSSPSLSDSYSHLSGRPIRKKTEEEEKLLKLLQGIPRPQDGFTQWCEQMLHTLSATGSLDVPMAVAILKEVESPYDVHDYIRSCLGDTLEAKEFAKQFLERRAKQKASQQRQQQQEAWLSSASLQTAFQANHSTKLGPGEGSKAKRRALMLHSDPSILGYSLHGSSGEIESVDDY

SEQ ID NO: 4497 - protein, 94 aa, Homo sapiens
  DEFA3 (NCBI Accession: NP_005208)
MRTLAILAAILLVALQAQAEPLQARADEVAAAPEQIAADIPEVVVSLAWDESLAPKHPGSRKNMDCYCRIPACIAGERRYGTCIYQGRLWAFCC

SEQ ID NO: 4498 - protein, 348 aa, Homo sapiens
  RSPH14 (NCBI Accession: NP_055248)
MAHSQNSLELPININATQITTAYGHRALPKLKEELQSEDLQTRQKALMALCDLMHDPECIYKAMNIGCMENLKALLKDSNSMVRIKTTEVLHITASHSVGRYAFLEHDIVLALSFLLNDPSPVCRGNLYKAYMQLVQVPRGAQEIISKGLISSLVWKLQVEVEEEEFQEFILDTLVLCLQEDATEALGSNVVLVLKQKLLSANQNIRSKAARALLNVSISREGKKQVCHFDVIPILVHLLKDPVEHVKSNAAGALMFATVITEGKYAALEAQAIGLLLELLHSPMTIARLNATKALTMLAEAPEGRKALQTHVPTFRAMEVETYEKPQVAEALQRAARIAISVIEFKP

SEQ ID NO: 4499 - protein, 99 aa, Homo sapiens
  CCL2 (NCBI Accession: NP_002973)
MKVSAALLCLLLIAATFIPQGLAQPDAINAPVTCCYNFTNRKISVQRLASYRRITSSKCPKEAVIFKTIVAKEICADPKQKWVQDSMDHLDKQTQTPKT

SEQ ID NO: 4500 - protein, 233 aa, Homo sapiens
  KLRC1 (NCBI Accession: NP_998823)
MDNQGVIYSDLNLPPNPKRQQRKPKGNKSSILATEQEITYAELNLQKASQDFQGNDKTYHCKDLPSAPEKLIVGILGIICLILMASVVTIVVIPSTLIQRHNNSSLNTRTQKARHCGHCPEEWITYSNSCYYIGKERRTWEESLLACTSKNSSLLSIDNEEEMKFLSIISPSSWIGVFRNSSHHPWVTMNGLAFKHEIKDSDNAELNCAVLQVNRLKSAQCGSSIIYHCKHKL

SEQ ID NO: 4501 - protein, 568 aa, Homo sapiens
  KLHL12 (NCBI Accession: NP_067646)
MGGIMAPKDIMTNTHAKSILNSMNSLRKSNTLCDVTLRVEQKDFPAHRIVLAACSDYFCAMFTSELSEKGKPYVDIQGLTASTMEILLDFVYTETVHVTVENVQELLPAACLLQLKGVKQACCEFLESQLDPSNCLGIRDFAETHNCVDLMQAAEVFSQKHFPEVVQHEEFILLSQGEVEKLIKCDEIQVDSEEPVFEAVINWVKHAKKEREESLPNLLQYVRMPLLTPRYITDVIDAEPFIRCSLQCRDLVDEAKKFHLRPELRSQMQGPRTRARLGANEVLLVVGGFGSQQSPIDVVEKYDPKTQEWSFLPSITRKRRYVASVSLHDRIYVIGGYDGRSRLSSVECLDYTADEDGVWYSVAPMNVRRGLAGATTLGDMIYVSGGFDGSRRHTSMERYDPNIDQWSMLGDMQTAREGAGLVVASGVIYCLGGYDGLNILNSVEKYDPHTGHWTNVTPMATKRSGAGVALLNDHIYVVGGFDGTAHLSSVEAYNIRTDSWTTVTSMTTPRCYVGATVLRGRLYAIAGYDGNSLLSSIECYDPIIDSWEVVTSMGTQRCDAGVCVLREK

SEQ ID NO: 4502 - protein, 237 aa, Homo sapiens
  NRL (NCBI Accession: XP_011535104)
MALPPSPLAMEYVNDFDLMKFEVKREPSEGRPGPPTASLGSTPYSSVPPSPTFSEPGMVGATEGTRPGLEELYWLATLQQQLGAGEALGLSPEEAMELLQGQGPVPVDGPHGYYPGSPEETGAQHVQLAERFSDAALVSMSVRELNRQLRGCGRDEALRLKQRRRTLKNRGYAQACRSKRLQQRRGLEAERARLAAQLDALRAEVARLARERDLYKARCDRLTSSGPGSGDPSHLFL

SEQ ID NO: 4503 - protein, 762 aa, Homo sapiens
  PLCD4 (NCBI Accession: NP_116115)
MASLLQDQLTTDQDLLLMQEGMPMRKVRSKSWKKLRYFRLQNDGMTVWHARQARGSAKPSFSISDVETIRNGHDSELLRSLAEELPLEQGFTIVFHGRRSNLDLMANSVEEAQIWMRGLQLLVDLVTSMDHQERLDQWLSDWFQRGDKNQDGKMSFQEVQRLLHLMNVEMDQEYAFSLFQAADTSQSGTLEGEEFVQFYKALTKRAEVQELFESFSADGQKLTLLEFLDFLQEEQKERDCTSELALELIDRYEPSDSGKLRHVLSMDGFLSYLCSKDGDIFNPACLPIYQDMTQPLNHYFICSSHNTYLVGDQLCGQSSVEGYIRALKRGCRCVEVDVWDGPSGEPVVYHGHTLTSRILFKDVVATVAQYAFQTSDYPVILSLETHCSWEQQQTMARHLTEILGEQLLSTTLDGVLPTQLPSPEELRRKILVKGKKLTLEEDLEYEEEEAEPELEESELALESQFETEPEPQEQNLQNKDKKKKSKPILCPALSSLVIYLKSVSFRSFTHSKEHYHFYEISSFSETKAKRLIKEAGNEFVQHNTWQLSRVYPSGLRTDSSNYNPQELWNAGCQMVAMNMQTAGLEMDICDGHFRQNGGCGYVLKPDFLRDIQSSFHPEKPISPFKAQTLLIQVISGQQLPKVDKTKEGSIVDPLVKVQIFGVRLDTARQETNYVENNGFNPYWGQTLCFRVLVPELAMLRFVVMDYDWKSRNDFIGQYTLPWTCMQQGYRHIHLLSKDGISLRPASIFVYICIQEGLEGDES

SEQ ID NO: 4504 - protein, 314 aa, Homo sapiens
  CCDC74B (NCBI Accession: NP_001245236)
MSGAGVAAGTRPPSSPTPGSRRRRQRPSVGVQSLRPQSPQLRQSDPQKRNLDLEKSLQFLQQQHSEMLAKLHEEIEHLKRENKDLRYKLIMNQTSQKKDSLSTSSFQSVKSISNSGKARPQPGSFNKQDSKADVPQKADLEEEPLLHNSKLDKVPGVQGQARKEKAEASNAGAACMGNSQHQGRQMGAAAHPPMILPLPLRKPTTLRQCEVLIRELWNTNLLQTQELQHLKSLLEGSQRPQAVPEEASFPRDQEATHFPKVSTKSLSKKCLLLSPPVAERAILPALKQTPKNNFAERQKRLQAMQKRRLHRSVL

SEQ ID NO: 4505 - protein, 359 aa, Homo sapiens
  HSPBP1 (NCBI Accession: NP_001123578)
MSDEGSRGSRLPLALPPASQGCSSGGGGGGSSAGGSGNSRPPRNLQGLLQMAITAGSEEPDPPPEPMSEERRQWLQEAMSAAFRGQREEVEQMKSCLRVLSQPMPPTAGEAEQAADQQEREGALELLADLCENMDNAADFCQLSGMHLLVGRYLEAGAAGLRWRAAQLIGTCSQNVAAIQEQVLGLGALRKLLRLLDRDACDTVRVKALFAISCLVREQEAGLLQFLRLDGFSVLMRAMQQQVQKLKVKSAFLLQNLLVGHPEHKGTLCSMGMVQQLVALVRTEHSPFHEHVLGALCSLVTDFPQGVRECREPELGLEELLRHRCQLLQQHEEYQEELEFCEKLLQTCFSSPADDSMDR

SEQ ID NO: 4506 - protein, 639 aa, Homo sapiens
  HSPA2 (NCBI Accession: NP_068814)
MSARGPAIGIDLGTTYSCVGVFQHGKVEIIANDQGNRTTPSYVAFTDTERLIGDAAKNQVAMNPTNTIFDAKRLIGRKFEDATVQSDMKHWPFRVVSEGGKPKVQVEYKGETKTFFPEEISSMVLTKMKEIAEAYLGGKVHSAVITVPAYFNDSQRQATKDAGTITGLNVLRIINEPTAAAIAYGLDKKGCAGGEKNVLIFDLGGGTFDVSILTIEDGIFEVKSTAGDTHLGGEDFDNRMVSHLAEEFKRKHKKDIGPNKRAVRRLRTACERAKRTLSSSTQASIEIDSLYEGVDFYTSITRARFEELNADLFRGTLEPVEKALRDAKLDKGQIQEIVLVGGSTRIPKIQKLLQDFFNGKELNKSINPDEAVAYGAAVQAAILIGDKSENVQDLLLLDVTPLSLGIETAGGVMTPLIKRNTTIPTKQTQTFTTYSDNQSSVLVQVYEGERAMTKDNNLLGKFDLTGIPPAPRGVPQIEVTFDIDANGILNVTAADKSTGKENKITITNDKGRLSKDDIDRMVQEAERYKSEDEANRDRVAAKNALESYTYNIKQTVEDEKLRGKISEQDKNKILDKCQEVINWLDRNQMAEKDEYEHKQKELERVCNPIISKLYQGGPGGGSGGGGSGASGGPTIEEVD

SEQ ID NO: 4507 - protein, 211 aa, Homo sapiens
  BAG2 (NCBI Accession: NP_004273)
MAQAKINAKANEGRFCRSSSMADRSSRLLESLDQLELRVEALREAATAVEQEKEILLEMIHSIQNSQDMRQISDGEREELNLTANRLMGRTLTVEVSVETIRNPQQQESLKHATRIIDEVVNKFLDDLGNAKSHLMSLYSACSSEVPHGPVDQKFQSIVIGCALEDQKKIKRRLETLLRNIENSDKAIKLLEHSKGAGSKTLQQNAESRFN

SEQ ID NO: 4508 - protein, 352 aa, Homo sapiens
  CXCR4 (NCBI Accession: NP_003458)
MEGISIYTSDNYTEEMGSGDYDSMKEPCFREENANFNKIFLPTIYSIIFLTGIVGNGLVILVMGYQKKLRSMTDKYRLHLSVADLLFVITLPFWAVDAVANWYFGNFLCKAVHVIYTVNLYSSVLILAFISLDRYLAIVHATNSQRPRKLLAEKVVYVGVWIPALLLTIPDFIFANVSEADDRYICDRFYPNDLWVVVFQFQHIMVGLILPGIVILSCYCIIISKLSHSKGHQKRKALKTTVILILAFFACWLPYYIGISIDSFILLEIIKQGCEFENTVHKWISITEALAFFHCCLNPILYAFLGAKFKTSAQHALTSVSRGSSLKILSKGKRGGHSSVSTESESSSFHSS

SEQ ID NO: 4509 - protein, 205 aa, Homo sapiens
  LINC00242 (NCBI Accession: NR_026781)
MMPRHLLPHSGITSLRRVPRRRLPSRRREDFRRFLFLSFVSTDKDGDPTGQASPAVPVPHFTTWGSLIPIDSQRNKERTRFTWMDGPPHGGLGTRFSGRGSASLTAPPGRCFTRERHPVPRQRKCRRQHSTGRKPHCGTRSAAPRNPKSIHKRSFSAKSLKNKTRNESPPVSALVSRTKTQPGQLHFCCQPSSSQAPASRRAKGR

SEQ ID NO: 4510 - protein, 794 aa, Homo sapiens
  STAT5A (NCBI Accession: NP_003143)
MAGWIQAQQLQGDALRQMQVLYGQHFPIEVRHYLAQWIESQPWDAIDLDNPQDRAQATQLLEGLVQELQKKAEHQVGEDGFLLKIKLGHYATQLQKTYDRCPLELVRCIRHILYNEQRLVREANNCSSPAGILVDAMSQKHLQINQTFEELRLVTQDTENELKKLQQTQEYFIIQYQESLRIQAQFAQLAQLSPQERLSRETALQQKQVSLEAWLQREAQTLQQYRVELAEKHQKTLQLLRKQQTIILDDELIQWKRRQQLAGNGGPPEGSLDVLQSWCEKLAEIIWQNRQQIRRAEHLCQQLPIPGPVEEMLAEVNATITDIISALVTSTFIIEKQPPQVLKTQTKFAATVRLLVGGKLNVHMNPPQVKATIISEQQAKSLLKNENTRNECSGEILNNCCVMEYHQATGTLSAHFRNMSLKRIKRADRRGAESVTEEKFTVLFESQFSVGSNELVFQVKTLSLPVVVIVHGSQDHNATATVLWDNAFAEPGRVPFAVPDKVLWPQLCEALNMKFKAEVQSNRGLTKENLVFLAQKLFNNSSSHLEDYSGLSVSWSQFNRENLPGWNYTFWQWFDGVMEVLKKHHKPHWNDGAILGFVNKQQAHDLLINKPDGTFLLRFSDSEIGGITIAWKFDSPERNLWNLKPFTTRDFSIRSLADRLGDLSYLIYVFPDRPKDEVFSKYYTPVLAKAVDGYVKPQIKQVVPEFVNASADAGGSSATYMDQAPSPAVCPQAPYNMYPQNPDHVLDQDGEFDLDETMDVARHVEELLRRPMDSLDSRLSPPAGLFTSARGSLS

SEQ ID NO: 4511 - protein, 191 aa, Homo sapiens
  CIB1 (NCBI Accession: NP_006375)
MGGSGSRLSKELLAEYQDLTFLTKQEILLAHRRFCELLPQEQRSVESSLRAQVPFEQILSLPELKANPFKERICRVFSTSPAKDSLSFEDFLDLLSVFSDTATPDIKSHYAFRIFDFDDDGTLNREDLSRLVNCLTGEGEDTRLSASEMKQLIDNILEESDIDRDGTINLSEFQHVISRSPDFASSFKIVL

SEQ ID NO: 4512 - protein, 514 aa, Homo sapiens
  TSNARE1 (NCBI Accession: NP_659440)
MSYGSIARGGGLGSRGPFGGPSRQGCQPLECARCWTEYGIRHFPCPSPESKLQNRCVGKDGEGDLGPAGTPIVPRARKRGPGVAPEGSRMPEPTSSPTIGPRKDSAAGPHGRMAGPSTTRAKKRKPNFCPQETEVLVSKVSKHHQLLFGTGLLKAEPTRRYRVWSRILQAVNALGYCRRDVVDLKHKWRDLRAVVRRKLGDLRKAAHGPSPGSGKPQALALTPVEQVVAKTFSCQALPSEGFSLEPPRATQVDPCNLQELFQEMSANVFRINSSVTSLERSLQSLGTPSDTQELRDSLHTAQQETNKTIAASASSVKQMAELLRSSCPQERLQQERPQLDRLKTQLSDAIQCYGVVQKKIAEKSRALLPMAQRGSKQQSPQAPFAELADDEKVFNGSDNMWQGQEQALLPDITEEDLEAIRLREEAILQMESNLLDVNQIIKDLASMVSEQGEAVDSIEASLEAASSHAEAARQLLAGASRHQLQRHKIKCCFLSAGVTALLVIIIIIATSVRK

SEQ ID NO: 4513 - protein, 278 aa, Homo sapiens
  HAUS1 (NCBI Accession: NP_612452)
MEPQEERETQVAAWLKKIFGDHPIPQYEVNPRTTEILHHLSERNRVRDRDVYLVIEDLKQKASEYESEAKYLQDLLMESVNFSPANLSSTGSRYLNALVDSAVALETKDTSLASFIPAVNDLTSDLFRTKSKSEEIKIELEKLEKNLTATLVLEKCLQEDVKKAELHLSTERAKVDNRRQNMDFLKAKSEEFRFGIKAAEEQLSARGMDASLSHQSLVALSEKLARLKQQTIPLKKKLESYLDLMPNPSLAQVKIEEAKRELDSIEAELTRRVDMMEL

SEQ ID NO: 4514 - protein, 177 aa, Homo sapiens
  DYDC1 (NCBI Accession: XP_011537637)
MESIYLQKHLGACLTQGLAEVARVRPVDPIEYLALWIYKYKENVTMEQLRQKEMAKLERERELALMEQEMMERLKAEELLLQQQQLALQLELEMQEKERQRIQELQRAQEQLGKEMRMNMENLVRNEDILHSEEATLDSGKTLAEISDRYGAPNLSRVEELDEPMFSDIALNIDQDL

SEQ ID NO: 4515 - protein, 412 aa, Homo sapiens
  TGFB3 (NCBI Accession: NP_003230.)
MKMHLQRALVVLALLNFATVSLSLSTCTTLDFGHIKKKRVEAIRGQILSKLRLTSPPEPTVMTHVPYQVLALYNSTRELLEEMHGEREEGCTQENTESEYYAKEIHKFDMIQGLAEHNELAVCPKGITSKVFRFNVSSVEKNRTNLFRAEFRVLRVPNPSSKRNEQRIELFQILRPDEHIAKQRYIGGKNLPTRGTAEWLSFDVTDTVREWLLRRESNLGLEISIHCPCHTFQPNGDILENIHEVMEIKFKGVDNEDDHGRGDLGRLKKQKDHHNPHLILMMIPPHRLDNPGQGGQRKKRALDTNYCFRNLEENCCVRPLYIDFRQDLGWKWVHEPKGYYANFCSGPCPYLRSADTTHSTVLGLYNTLNPEASASPCCVPQDLEPLTILYYVGRTPKVEQLSNMVVKSCKCS

SEQ ID NO: 4516 - protein, 263 aa, Homo sapiens
  CTRB2 (NCBI Accession: NP_001020371)
MAFLWLLSCWALLGTTFGCGVPAIHPVLSGLSRIVNGEDAVPGSWPWQVSLQDKTGFHFCGGSLISEDWVVTAAHCGVRTSDVVVAGEFDQGSDEENIQVLKIAKVFKNPKFSILTVNNDITLLKLATPARFSQTVSAVCLPSADDDFPAGTLCATTGWGKTKYNANKTPDKLQQAALPLLSNAECKKSWGRRITDVMICAGASGVSSCMGDSGGPLVCQKDGAWTLVGIVSWGSRTCSTTTPAVYARVAKLIPWVQKILAAN

SEQ ID NO: 4517 - protein, 356 aa, Homo sapiens
  NFKBIB (NCBI Accession: NP_002494)
MAGVACLGKAADADEWCDSGLGSLGPDAAAPGGPGLGAELGPGLSWAPLVFGYVTEDGDTALHLAVIHQHEPFLDFLLGFSAGTEYMDLQNDLGQTALHLAAILGETSTVEKLYAAGAGLCVAERRGHTALHLACRVGAHACARALLQPRPRRPREAPDTYLAQGPDRTPDTNHTPVALYPDSDLEKEEEESEEDWKLQLEAENYEGHTPLHVAVIHKDVEMVRLLRDAGADLDKPEPTCGRSPLHLAVEAQAADVLELLLRAGANPAARMYGGRTPLGSAMLRPNPILARLLRAHGAPEPEGEDEKSGPCSSSSDSDSGDEGDEYDDIVVHSSRSQTRLPPTPASKPLPDDPRPV

SEQ ID NO: 4518 - protein, 126 aa, Homo sapiens
  CDK2AP2 (NCBI Accession: NP_005842)
MSYKPIAPAPSSTPGSSTPGPGTPVPTGSVPSPSGSVPGAGAPFRPLFNDFGPPSMGYVQAMKPPGAQGSQSTYTDLLSVIEEMGKEIRPTYAGSKSAMERLKRGIIHARALVRECLAETERNART

SEQ ID NO: 4519 - protein, 398 aa, Homo sapiens
  LIPN (NCBI Accession: XP_011538385)
MMWLLLTTTCLICGTLNAGGFLDLENEVNPEVWMNTSEIIIYNGYPSEEYEVTTEDGYILLVNRIPYGRTHARSTGPRPVVYMQHALFADNAYWLENYANGSLGFLLADAGYDVWMGNSRGNTWSRRHKTLSETDEKFWAFSFDEMAKYDLPGVIDFIVNKTGQEKLYFIGHSLGTTIGFVAFSTMPELAQRIKMNFALGPTISFKYPTGIFTRFFLLPNSIIKAVFGTKGFFLEDKKTKIASTKICNNKILWLICSEFMSLWAGSNKKNMNQSRMDVYMSHAPTGSSVHNILHIKQLYHSDEFRAYDWGNDADNMKHYNQSHPPIYDLTAMKVPTAIWAGGHDVLVTPQDVARILPQIKSLHYFKLLPDWNHFDFVWGLDAPQRMYSEIIALMKAYS

SEQ ID NO: 4520 - protein, 566 aa, Homo sapiens
  RGS14 (NCBI Accession: NP_006471)
MPGKPKHLGVPNGRMVLAVSDGELSSTTGPQGQGEGRGSSLSIHSLPSGPSSPFPTEEQPVASWALSFERLLQDPLGLAYFTEFLKKEFSAENVTFWKACERFQQIPASDTQQLAQEARNIYQEFLSSQALSPVNIDRQAWLGEEVLAEPRPDMFRAQQLQIFNLMKFDSYARFVKSPLYRECLLAEAEGRPLREPGSSRLGSPDATRKKPKLKPGKSLPLGVEELGQLPPVEGPGGRPLRKSFRRELGGTANAALRRESQGSLNSSASLDLGFLAFVSSKSESHRKSLGSTEGESESRPGKYCCVYLPDGTASLALARPGLTIRDMLAGICEKRGLSLPDIKVYLVGNEQALVLDQDCTVLADQEVRLENRITFELELTALERVVRISAKPTKRLQEALQPILEKHGLSPLEVVLHRPGEKQPLDLGKLVSSVAAQRLVLDTLPGVKISKARDKSPCRSQGCPPRTQDKATHPPPASPSSLVKVPSSATGKRQTCDIEGLVELLNRVQSSGAHDQRGLLRKEDLVLPEFLQLPAQGPSSEETPPQTKSAAQPIGGSLNSTTDSAL

SEQ ID NO: 4521 - protein, 493 aa, Homo sapiens
  LRRC14 (NCBI Accession: NP_001258965)
MHTLVFLSTRQVLQCQPAACQALPLLPRELFPLLFKVAFMDKKTVVLRELVHTWPFPLLSFQQLLQECAHCSRALLQERPSTESMQAVILGLTARLHTSEPGASTQPLCRKHALRVLDMTGLLDDGVEQDPGTMSMWDCTAAVARTCIAQQQGGAAEPGPAPIPVEVRVDLRVNRASYAFLREALRSSVGSPLRLCCRDLRAEDLPMRNTVALLQLLDAGCLRRVDLRFNNLGLRGLSVIIPHVARFQHLASLRLHYVHGDSRQPSVDGEDNFRYFLAQMGRFTCLRELSMGSSLLSGRLDQLLSTLQSPLESLELAFCALLPEDLRFLARSPHAAHLKKLDLSGNDLSGSQLAPFQGLLQASAATLLHLELTECQLADTQLLATLPILTQCASLRYLGLYGNPLSMAGLKELLRDSVAQAELRTVVHPFPVDCYEGLPWPPPASVLLEASINEEKFARVEAELHQLLLASGRAHVLWTTDIYGRLAADYFSL

SEQ ID NO: 4522 - protein, 683 aa, Homo sapiens
  TGFBI (NCBI Accession: NP_000349)
MALFVRLLALALALALGPAATLAGPAKSPYQLVLQHSRLRGRQHGPNVCAVQKVIGTNRKYFTNCKQWYQRKICGKSTVISYECCPGYEKVPGEKGCPAALPLSNLYETLGVVGSTTTQLYTDRTEKLRPEMEGPGSFTIFAPSNEAWASLPAEVLDSLVSNVNIELLNALRYHMVGRRVLTDELKHGMTLTSMYQNSNIQIHHYPNGIVTVNCARLLKADHHATNGVVHLIDKVISTITNNIQQIIEIEDTFETLRAAVAASGLNTMLEGNGQYTLLAPTNEAFEKIPSETLNRILGDPEALRDLLNNHILKSAMCAEAIVAGLSVETLEGTTLEVGCSGDMLTINGKAIISNKDILATNGVIHYIDELLIPDSAKTLFELAAESDVSTAIDLFRQAGLGNHLSGSERLTLLAPLNSVFKDGTPPIDAHTRNLLRNHIIKDQLASKYLYHGQTLETLGGKKLRVFVYRNSLCIENSCIAAHDKRGRYGTLFTMDRVLTPPMGTVMDVLKGDNRFSMLVAAIQSAGLTETLNREGVYTVFAPTNEAFRALPPRERSRLLGDAKELANILKYHIGDEILVSGGIGALVRLKSLQGDKLEVSLKNNVVSVNKEPVAEPDIMATNGVVHVITNVLQPPANRPQERGDELADSALEIFKQASAFSRASQRSVRLAPVYQKLLERMKH

SEQ ID NO: 4523 - protein, 239 aa, Homo sapiens
  BCL2 (NCBI Accession: NP_000624)
MAHAGRTGYDNREIVMKYIHYKLSQRGYEWDAGDVGAAPPGAAPAPGIFSSQPGHTPHPAASRDPVARTSPLQTPAAPGAAAGPALSPVPPVVHLTLRQAGDDFSRRYRRDFAEMSSQLHLTPFTARGRFATVVEELFRDGVNWGRIVAFFEFGGVMCVESVNREMSPLVDNIALWMTEYLNRHLHTWIQDNGGWDAFVELYGPSMRPLFDFSWLSLKTLLSLALVGACITLGAYLGHK

SEQ ID NO: 4524 - protein, 472 aa, Homo sapiens
  DIXDC1 (NCBI Accession: NP_219493)
MGGTQVKCLTSPSPIHSAKSESIITQSEEKADFVIIPAEGIENRTEGTDSPLSRDWRPGSPGTYLETSWEEQLLEQQEYLEKEMEEAKKMISGLQALLLNGSLPEDEQERPLALCEPGVNPEEQLIIIQSRLDQSMEENQDLKKELLKCKQEARNLQGIKDALQQRLTQQDTSVLQLKQELLRANMDKDELHNQNVDLQRKLDERNRLLGEYKKELGQKDRLLQQHQAKLEEALRKLSDVSYHQVDLERELEHKDVLLAHCMKREADEATNYNSHNSQSNGFLLPTAGKGATSVSNRGTSDLQLVRDALRSLRNSFSGHDPQHHTIDSLEQGISSLMERLHVMETQKKQERKVRVKSPRTQVGSEYRESWPPNSKLPHSQSSPTVSSTCTKVLYFTDRSLTPFMVNIPKRLEEVTLKDFKAAIDREGNHRYHFKALDPEFGTVKEEIFHDDDAIPGWEGKIVAWVEEDHGEN

SEQ ID NO: 4525 - protein, 278 aa, Homo sapiens
  CASP8 (NCBI Accession: NP_001073593)
MDFSRNLYDIGEQLDSEDLASLKFLSLDYIPQRKQEPIKDALMLFQRLQEKRMLEESNLSFLKELLFRINRLDLLITYLNTRKEEMERELQTPGRAQISAYRVMLYQISEEVSRSELRSFKFLLQEEISKCKLDDDMNLLDIFIEMEKRVILGEGKLDILKRVCAQINKSLLKIINDYEEFSKGEELCGVMTISDSPREQDSESQTLDKVYQMKSKPRGYCLIINNHNFAKAREKVPKLHSIRDRNGTHLDAGSHSVAQAGVQWCDLGSLQPPPPWFG

SEQ ID NO: 4526 - protein, 622 aa, Homo sapiens
  PGM2L1 (NCBI Accession: NP_775853)
MAENTEGDLNSNLPHAPYHTGDPQLDTAIGQWLRWDKNPKTKEQIENLLRNGMNKELRDRLCCRMTFGTAGLRSAMGAGFCYINDLTVIQSTQGMYKYLERCFSDFKQRGFVVGYDTRGQVTSSCSSQRLAKLTAAVLLAKDVPVYLFSRYVPTPFVPYAVQKLKAVAGVMITASHNRKEDNGYKVYWETGAQITSPHDKEILKCIEECVEPWNGSWNDNLVDTSPLKRDPLQDICRRYMEDLKKICFYRELNSKTTLKFVHTSFHGVGHDYVQLAFKVFGFKPPIPVPEQKDPDPDFSTVKCPNPEEGESVLELSLRLAEKENARVVLATDPDADRLAAAELQENGCWKVFTGNELAALFGWWMFDCWKKNKSRNADVKNVYMLATTVSSKILKAIALKEGFHFEETLPGFKWIGSRIIDLLENGKEVLFAFEESIGFLCGTSVLDKDGVSAAVVVAEMASYLETMNITLKQQLVKVYEKYGYHISKTSYFLCYEPPTIKSIFERLRNFDSPKEYPKFCGTFAILHVRDITTGYDSSQPNKKSVLPVSKNSQMITFTFQNGCVATLRTSGTEPKIKYYAEMCASPDQSDTALLEEELKKLIDALIENFLQPSKNGLIWRSV

SEQ ID NO: 4527 - protein, 288 aa, Homo sapiens
  PDCD1 (NCBI Accession: NP_005009)
MQIPQAPWPVVWAVLQLGWRPGWFLDSPDRPWNPPTFSPALLVVTEGDNATFTCSFSNTSESFVLNWYRMSPSNQTDKLAAFPEDRSQPGQDCRFRVTQLPNGRDFHMSVVRARRNDSGTYLCGAISLAPKAQIKESLRAELRVTERRAEVPTAHPSPSPRPAGQFQTLVVGVVGGLLGSLVLLVWVLAVICSRAARGTIGARRTGQPLKEDPSAVPVFSVDYGELDFQWREKTPEPPVPCVPEQTEYATIVFPSGMGTSSPARRGSADGPRSAQPLRPEDGHCSWPL

SEQ ID NO: 4528 - protein, 328 aa, Homo sapiens
  GRHPR (NCBI Accession: NP_036335)
MRPVRLMKVFVTRRIPAEGRVALARAADCEVEQWDSDEPIPAKELERGVAGAHGLLCLLSDHVDKRILDAAGANLKVISTMSVGIDHLALDEIKKRGIRVGYTPDVLTDTTAELAVSLLLTTCRRLPEAIEEVKNGGWTSWKPLWLCGYGLTQSTVGIIGLGRIGQAIARRLKPFGVQRFLYTGRQPRPEEAAEFQAEFVSTPELAAQSDFIVVACSLTPATEGLCNKDFFQKMKETAVFINISRGDVVNQDDLYQALASGKIAAAGLDVTSPEPLPTNHPLLTLKNCVILPHIGSATHRTRNTMSLLAANNLLAGLRGEPMPSELKL

SEQ ID NO: 4529 - protein, 237 aa, Homo sapiens
  CYB5R2 (NCBI Accession: NP_057313)
MNSRRREPITLQDPEAKYPLPLIEKEKISHNTRRFRFGLPSPDHVLGLPVGNYVQLLAKIDNELVVRAYTPVSSDDDRGFVDLIIKIYFKNVHPQYPEGGKMTQYLENMKIGETIFFRGPRGRLFYHGPGNLGIRPDQTSEPKKTLADHLGMIAGGTGITPMLQLIRHITKDPSDRTRMSLIFANQTEEDILVRKELEEIARTHPDQFDLWYTLDRPPIGPWSAEGATLLSNSAQFH

SEQ ID NO: 4530 - protein, 282 aa, Homo sapiens
  ACBD6 (NCBI Accession: NP_115736)
MASSFLPAGAITGDSGGELSSGDDSGEVEFPHSPEIEETSCLAELFEKAAAHLQGLIQVASREQLLYLYARYKQVKVGNCNTPKPSFFDFEGKQKWEAWKALGDSSPSQAMQEYIAVVKKLDPGWNPQIPEKKGKEANTGFGGPVISSLYHEETIREEDKNIFDYCRENNIDHITKAIKSKNVDVNVKDEEGRALLHWACDRGHKELVTVLLQHRADINCQDNEGQTALHYASACEFLDIVELLLQSGADPTLRDQDGCLPEEVTGCKTVSLVLQRHTTGKA

SEQ ID NO: 4531 - protein, 301 aa, Homo sapiens
  PDCL (NCBI Accession: NP_005379)
MTTLDDKLLGEKLQYYYSSSEDEDSDHEDKDRGRCAPASSSVPAEAELAGEGISVNTGPKGVINDWRRFKQLETEQREEQCREMERLIKKLSMTCRSHLDEEEEQQKQKDLQEKISGKMTLKEFAIMNEDQDDEEFLQQYRKQRMEEMRQQLHKGPQFKQVFEISSGEGFLDMIDKEQKSIVIMVHIYEDGIPGTEAMNGCMICLAAEYPAVKFCKVKSSVIGASSQFTRNALPALLIYKGGELIGNFVRVTDQLGDDFFAVDLEAFLQEFGLLPEKEVLVLTSVRNSATCHSEDSDLEID

SEQ ID NO: 4532 - protein, 599 aa, Homo sapiens
  DDX52 (NCBI Accession: NP_001278405)
MDVHDLFRRLGAGAKFDTRRFSADAARFQIGKRKYDFDSSEVLQGLDFFGNKKSVPGVCGASQTHQKPQNGEKKEESLTERKREQSKKKRKTMTSEIASQEEGATIQWMSSVEAKIEDKKVQRESKLTSGKLENLRKEKINFLRNKHKIHVQGTDLPDPIATFQQLDQEYKINSRLLQNILDAGFQMPTPIQMQAIPVMLHGRELLASAPTGSGKTLAFSIPILMQLKQPANKGFRALIISPTRELASQIHRELIKISEGTGFRIHMIHKAAVAAKKFGPKSSKKFDILVTTPNRLIYLLKQDPPGIDLASVEWLVVDESDKLFEDGKTGFRDQLASIFLACTSHKVRRAMFSATFAYDVEQWCKLNLDNVISVSIGARNSAVETVEQELLFVGSETGKLLAVRELVKKGFNPPVLVFVQSIERAKELFHELIYEGINVDVIHAERTQQQRDNTVHSFRAGKIWVLICTALLARGIDFKGVNLVINYDFPTSSVEYIHRIGRTGRAGNKGKAITFFTEDDKPLLRSVANVIQQAGCPVPEYIKGFQKLLSKQKKKMIKKPLERESISTTPKCFLEKAKDKQKKVTGQNSKKKVALEDKS

SEQ ID NO: 4533 - protein, 362 aa, Homo sapiens
  GPR4 (NCBI Accession: NP_005273)
MGNHTWEGCHVDSRVDHLFPPSLYIFVIGVGLPTNCLALWAAYRQVQQRNELGVYLMNLSIADLLYICTLPLWVDYFLHHDNWIHGPGSCKLFGFIFYTNIYISIAFLCCISVDRYLAVAHPLRFARLRRVKTAVAVSSVVWATELGANSAPLFHDELFRDRYNHTFCFEKFPMEGWVAWMNLYRVFVGFLFPWALMLLSYRGILRAVRGSVSTERQEKAKIKRLALSLIAIVLVCFAPYHVLLLSRSAIYLGRPWDCGFEERVFSAYHSSLAFTSLNCVADPILYCLVNEGARSDVAKALHNLLRFLASDKPQEMANASLTLETPLTSKRNSTAKAMTGSWAATPPSQGDQVQLKMLPPAQ

SEQ ID NO: 4534 - protein, 116 aa, Homo sapiens
  GAGE2A (NCBI Accession: NP_001120684)
MSWRGRSTYRPRPRRYVEPPEMIGPMRPEQFSDEVEPATPEEGEPATQRQDPAAAQEGQDEGASAGQGPKPEAHSQEQGHPQTGCECEDGPDGQEMDPPNPEEVKTPEEGEKQSQC

SEQ ID NO: 4535 - protein, 210 aa, Homo sapiens
  POLR2E (NCBI Accession: NP_002686)
MDDEEETYRLWKIRKTIMQLCHDRGYLVTQDELDQTLEEFKAQFGDKPSEGRPRRTDLTVLVAHNDDPTDQMFVFFPEEPKVGIKTIKVYCQRMQEENITRALIVVQQGMTPSAKQSLVDMAPKYILEQFLQQELLINITEHELVPEHVVMTKEEVTELLARYKLRENQLPRIQAGDPVARYFGIKRGQVVKIIRPSETAGRYITYRLVQ

SEQ ID NO: 4536 - protein, 217 aa, Homo sapiens
  BCL7C (NCBI Accession: NP_004756)
MAGRTVRAETRSRAKDDIKKVMATIEKVRRWEKRWVTVGDTSLRIFKWVPVVDPQEEERRRAGGGAERSRGRERRGRGASPRGGGPLILLDLNDENSNQSFHSEGSLQKGTEPSPGGTPQPSRPVSPAGPPEGVPEEAQPPRLGQERDPGGITAGSTDEPPMLTKEEPVPELLEAEAPEAYPVFEPVPPVPEAAQGDTEDSEGAPPLKRICPNAPDP

SEQ ID NO: 4537 - protein, 597 aa, Homo sapiens
  UTP6 (NCBI Accession: NP_060898)
MAEIIQERIEDRLPELEQLERIGLFSHAEIKAIIKKASDLEYKIQRRTLFKEDFINYVQYEINLLELIQRRRTRIGYSFKKDEIENSIVHRVQGVFQRASAKWKDDVQLWLSYVAFCKKWATKTRLSKVFSAMLAIHSNKPALWIMAAKWEMEDRLSSESARQLFLRALRFHPECPKLYKEYFRMELMHAEKLRKEKEEFEKASMDVENPDYSEEILKGELAWIIYKNSVSIIKGAEFHVSLLSIAQLFDFAKDLQKEIYDDLQALHTDDPLTWDYVARRELEIESQTEEQPTTKQAKAVEVGRKEERCCAVYEEAVKTLPTEAMWKCYITFCLERFTKKSNSGFLRGKRLERTMTVFRKAHELKLLSECQYKQLSVSLLCYNFLREALEVAVAGTELFRDSGTMWQLKLQVLIESKSPDIAMLFEEAFVHLKPQVCLPLWISWAEWSEGAKSQEDTEAVFKKALLAVIGADSVTLKNKYLDWAYRSGGYKKARAVFKSLQESRPFSVDFFRKMIQFEKEQESCNMANIREYYERALREFGSADSDLWMDYMKEELNHPLGRPENCGQIYWRAMKMLQGESAEAFVAKHAMHQTGHL

SEQ ID NO: 4538 - protein, 350 aa, Homo sapiens
  RP2 (NCBI Accession: NP_008846)
MGCFFSKRRKADKESRPENEEERPKQYSWDQREKVDPKDYMFSGLKDETVGRLPGTVAGQQFLIQDCENCNIYIFDHSATVTIDDCTNCIIFLGPVKGSVFFRNCRDCKCTLACQQFRVRDCRKLEVFLCCATQPIIESSSNIKFGCFQWYYPELAFQFKDAGLSIFNNTWSNIHDFTPVSGELNWSLLPEDAVVQDYVPIPTTEELKAVRVSTEANRSIVPISRGQRQKSSDESCLVVLFAGDYTIANARKLIDEMVGKGFFLVQTKEVSMKAEDAQRVFREKAPDFLPLLNKGPVIALEFNGDGAVEVCQLIVNEIFNGTKMFVSESKETASGDVDSFYNFADIQMGI
